United States Patent Application Publication US 2024/0101646 A1 - sequence listing, part 2

SEQ ID NO: 23460 - protein, 9 aa, Artificial Sequence
  Synthetic construct
SSNIGAGYD

SEQ ID NO: 23461 - protein, 8 aa, Artificial Sequence
  Synthetic construct
RSDIGSHA

SEQ ID NO: 23462 - protein, 7 aa, Artificial Sequence
  Synthetic construct
QSLTSIY

SEQ ID NO: 23463 - protein, 6 aa, Artificial Sequence
  Synthetic construct
QNINIY

SEQ ID NO: 23464 - protein, 8 aa, Artificial Sequence
  Synthetic construct
NSNIGSNT

SEQ ID NO: 23465 - protein, 11 aa, Artificial Sequence
  Synthetic construct
QSLLHSDGKTY

SEQ ID NO: 23466 - protein, 6 aa, Artificial Sequence
  Synthetic construct
QSVSSN

SEQ ID NO: 23467 - protein, 6 aa, Artificial Sequence
  Synthetic construct
ALPKKY

SEQ ID NO: 23468 - protein, 9 aa, Artificial Sequence
  Synthetic construct
SSDIGGYSY

SEQ ID NO: 23469 - protein, 11 aa, Artificial Sequence
  Synthetic construct
QSLLDSDGKTY

SEQ ID NO: 23470 - protein, 6 aa, Artificial Sequence
  Synthetic construct
QSIRTY

SEQ ID NO: 23471 - protein, 11 aa, Artificial Sequence
  Synthetic construct
QSLLKSDGNTY

SEQ ID NO: 23472 - protein, 9 aa, Artificial Sequence
  Synthetic construct
SSDVGSYNL

SEQ ID NO: 23473 - protein, 6 aa, Artificial Sequence
  Synthetic construct
QGISNY

SEQ ID NO: 23474 - protein, 6 aa, Artificial Sequence
  Synthetic construct
ALPKKY

SEQ ID NO: 23475 - protein, 6 aa, Artificial Sequence
  Synthetic construct
QDIRND

SEQ ID NO: 23476 - protein, 6 aa, Artificial Sequence
  Synthetic construct
QGISTY

SEQ ID NO: 23477 - protein, 9 aa, Artificial Sequence
  Synthetic construct
SSDIGAYNY

SEQ ID NO: 23478 - protein, 9 aa, Artificial Sequence
  Synthetic construct
TGAVTSGHY

SEQ ID NO: 23479 - protein, 9 aa, Artificial Sequence
  Synthetic construct
SSDVGYYYS

SEQ ID NO: 23480 - protein, 12 aa, Artificial Sequence
  Synthetic construct
QSVLYSSNNKNY

SEQ ID NO: 23481 - protein, 6 aa, Artificial Sequence
  Synthetic construct
QSVGSN

SEQ ID NO: 23482 - protein, 11 aa, Artificial Sequence
  Synthetic construct
QSLLYSNGYTY

SEQ ID NO: 23483 - protein, 6 aa, Artificial Sequence
  Synthetic construct
QSISSW

SEQ ID NO: 23484 - protein, 6 aa, Artificial Sequence
  Synthetic construct
QGIRSY

SEQ ID NO: 23485 - protein, 9 aa, Artificial Sequence
  Synthetic construct
SSDVGGYNY

SEQ ID NO: 23486 - protein, 9 aa, Artificial Sequence
  Synthetic construct
SSDVGGYNY

SEQ ID NO: 23487 - protein, 9 aa, Artificial Sequence
  Synthetic construct
SSDIGDYNY

SEQ ID NO: 23488 - protein, 6 aa, Artificial Sequence
  Synthetic construct
QSVSSY

SEQ ID NO: 23489 - protein, 6 aa, Artificial Sequence
  Synthetic construct
ALPKQY

SEQ ID NO: 23490 - protein, 9 aa, Artificial Sequence
  Synthetic construct
SSNIGAGYD

SEQ ID NO: 23491 - protein, 9 aa, Artificial Sequence
  Synthetic construct
SSDVGGYNY

SEQ ID NO: 23492 - protein, 6 aa, Artificial Sequence
  Synthetic construct
QSVSNF

SEQ ID NO: 23493 - protein, 12 aa, Artificial Sequence
  Synthetic construct
QSVLYNSSNKNY

SEQ ID NO: 23494 - protein, 6 aa, Artificial Sequence
  Synthetic construct
KLGDKY

SEQ ID NO: 23495 - protein, 6 aa, Artificial Sequence
  Synthetic construct
QDIRIY

SEQ ID NO: 23496 - protein, 6 aa, Artificial Sequence
  Synthetic construct
QGIRND

SEQ ID NO: 23497 - protein, 6 aa, Artificial Sequence
  Synthetic construct
QSVSSD

SEQ ID NO: 23498 - protein, 9 aa, Artificial Sequence
  Synthetic construct
SSNIGAGYD

SEQ ID NO: 23499 - protein, 6 aa, Artificial Sequence
  Synthetic construct
ALPKLY

SEQ ID NO: 23500 - protein, 7 aa, Artificial Sequence
  Synthetic construct
QSVSSSY

SEQ ID NO: 23501 - protein, 9 aa, Artificial Sequence
  Synthetic construct
SSNIGADYD

SEQ ID NO: 23502 - protein, 6 aa, Artificial Sequence
  Synthetic construct
QSVSSS

SEQ ID NO: 23503 - protein, 6 aa, Artificial Sequence
  Synthetic construct
ALPKKY

SEQ ID NO: 23504 - protein, 8 aa, Artificial Sequence
  Synthetic construct
SGRIASNY

SEQ ID NO: 23505 - protein, 12 aa, Artificial Sequence
  Synthetic construct
QSVLFTSNNKNY

SEQ ID NO: 23506 - protein, 6 aa, Artificial Sequence
  Synthetic construct
QSISSY

SEQ ID NO: 23507 - protein, 6 aa, Artificial Sequence
  Synthetic construct
QDISSY

SEQ ID NO: 23508 - protein, 6 aa, Artificial Sequence
  Synthetic construct
QSVSSN

SEQ ID NO: 23509 - protein, 12 aa, Artificial Sequence
  Synthetic construct
QSVLYSSNSKNY

SEQ ID NO: 23510 - protein, 7 aa, Artificial Sequence
  Synthetic construct
QSVSSSY

SEQ ID NO: 23511 - protein, 9 aa, Artificial Sequence
  Synthetic construct
SSDVGSYNR

SEQ ID NO: 23512 - protein, 6 aa, Artificial Sequence
  Synthetic construct
ALSKKY

SEQ ID NO: 23513 - protein, 6 aa, Artificial Sequence
  Synthetic construct
QSVSSY

SEQ ID NO: 23514 - protein, 9 aa, Artificial Sequence
  Synthetic construct
SSDVGGYNY

SEQ ID NO: 23515 - protein, 8 aa, Artificial Sequence
  Synthetic construct
SGSIASNY

SEQ ID NO: 23516 - protein, 9 aa, Artificial Sequence
  Synthetic construct
SNDVGGYKY

SEQ ID NO: 23517 - protein, 6 aa, Artificial Sequence
  Synthetic construct
NIGSKS

SEQ ID NO: 23518 - protein, 6 aa, Artificial Sequence
  Synthetic construct
QSISRY

SEQ ID NO: 23519 - protein, 11 aa, Artificial Sequence
  Synthetic construct
QSLLHSDGKTY

SEQ ID NO: 23520 - protein, 11 aa, Artificial Sequence
  Synthetic construct
QSLLHSNGHNY

SEQ ID NO: 23521 - protein, 6 aa, Artificial Sequence
  Synthetic construct
QSVSNF

SEQ ID NO: 23522 - protein, 7 aa, Artificial Sequence
  Synthetic construct
QSVSGSY

SEQ ID NO: 23523 - protein, 6 aa, Artificial Sequence
  Synthetic construct
QSIISY

SEQ ID NO: 23524 - protein, 7 aa, Artificial Sequence
  Synthetic construct
QSVSSSY

SEQ ID NO: 23525 - protein, 8 aa, Artificial Sequence
  Synthetic construct
TSNIGKNY

SEQ ID NO: 23526 - protein, 7 aa, Artificial Sequence
  Synthetic construct
QSVSSSY

SEQ ID NO: 23527 - protein, 6 aa, Artificial Sequence
  Synthetic construct
QDINNY

SEQ ID NO: 23528 - protein, 6 aa, Artificial Sequence
  Synthetic construct
QSVGSN

SEQ ID NO: 23529 - protein, 9 aa, Artificial Sequence
  Synthetic construct
SSDILDYIF

SEQ ID NO: 23530 - protein, 6 aa, Artificial Sequence
  Synthetic construct
NIGSKS

SEQ ID NO: 23531 - protein, 7 aa, Artificial Sequence
  Synthetic construct
SGHSSYA

SEQ ID NO: 23532 - protein, 6 aa, Artificial Sequence
  Synthetic construct
QGISND

SEQ ID NO: 23533 - protein, 6 aa, Artificial Sequence
  Synthetic construct
QDIRND

SEQ ID NO: 23534 - protein, 6 aa, Artificial Sequence
  Synthetic construct
KLGDKY

SEQ ID NO: 23535 - protein, 8 aa, Artificial Sequence
  Synthetic construct
NSNIGNNY

SEQ ID NO: 23536 - protein, 9 aa, Artificial Sequence
  Synthetic construct
TGAVTSGHY

SEQ ID NO: 23537 - protein, 6 aa, Artificial Sequence
  Synthetic construct
ALPKKY

SEQ ID NO: 23538 - protein, 6 aa, Artificial Sequence
  Synthetic construct
NIGSKN

SEQ ID NO: 23539 - protein, 9 aa, Artificial Sequence
  Synthetic construct
SSDVGGYNY

SEQ ID NO: 23540 - protein, 8 aa, Artificial Sequence
  Synthetic construct
SSNVGNSF

SEQ ID NO: 23541 - protein, 6 aa, Artificial Sequence
  Synthetic construct
QGISSY

SEQ ID NO: 23542 - protein, 6 aa, Artificial Sequence
  Synthetic construct
QSVSSY

SEQ ID NO: 23543 - protein, 6 aa, Artificial Sequence
  Synthetic construct
QGISSY

SEQ ID NO: 23544 - protein, 6 aa, Artificial Sequence
  Synthetic construct
QSVSSY

SEQ ID NO: 23545 - protein, 11 aa, Artificial Sequence
  Synthetic construct
QSLVYSDGNTY

SEQ ID NO: 23546 - protein, 9 aa, Artificial Sequence
  Synthetic construct
SSNIGAGYD

SEQ ID NO: 23547 - protein, 9 aa, Artificial Sequence
  Synthetic construct
SSDVGSYDH

SEQ ID NO: 23548 - protein, 6 aa, Artificial Sequence
  Synthetic construct
QSVSSN

SEQ ID NO: 23549 - protein, 6 aa, Artificial Sequence
  Synthetic construct
ALPKKY

SEQ ID NO: 23550 - protein, 11 aa, Artificial Sequence
  Synthetic construct
QSLVYSDGNTY

SEQ ID NO: 23551 - protein, 6 aa, Artificial Sequence
  Synthetic construct
QGISSW

SEQ ID NO: 23552 - protein, 9 aa, Artificial Sequence
  Synthetic construct
SSDVGGHNY

SEQ ID NO: 23553 - protein, 6 aa, Artificial Sequence
  Synthetic construct
QSINSY

SEQ ID NO: 23554 - protein, 11 aa, Artificial Sequence
  Synthetic construct
QSLLHSNGYNY

SEQ ID NO: 23555 - protein, 9 aa, Artificial Sequence
  Synthetic construct
SSDAGGYKC

SEQ ID NO: 23556 - protein, 6 aa, Artificial Sequence
  Synthetic construct
QVISNW

SEQ ID NO: 23557 - protein, 6 aa, Artificial Sequence
  Synthetic construct
KLGDKY

SEQ ID NO: 23558 - protein, 6 aa, Artificial Sequence
  Synthetic construct
KLGDKY

SEQ ID NO: 23559 - protein, 9 aa, Artificial Sequence
  Synthetic construct
SGSVSTGSG

SEQ ID NO: 23560 - protein, 6 aa, Artificial Sequence
  Synthetic construct
VLAKKY

SEQ ID NO: 23561 - protein, 9 aa, Artificial Sequence
  Synthetic construct
SSNIGAGYD

SEQ ID NO: 23562 - protein, 6 aa, Artificial Sequence
  Synthetic construct
NIGSKS

SEQ ID NO: 23563 - protein, 6 aa, Artificial Sequence
  Synthetic construct
QGISSY

SEQ ID NO: 23564 - protein, 11 aa, Artificial Sequence
  Synthetic construct
QSLVFSDGNTY

SEQ ID NO: 23565 - protein, 8 aa, Artificial Sequence
  Synthetic construct
SSNIGNNY

SEQ ID NO: 23566 - protein, 12 aa, Artificial Sequence
  Synthetic construct
QSVLYSSNNKNF

SEQ ID NO: 23567 - protein, 9 aa, Artificial Sequence
  Synthetic construct
RSDVGRFNY

SEQ ID NO: 23568 - protein, 8 aa, Artificial Sequence
  Synthetic construct
SSNIGNNY

SEQ ID NO: 23569 - protein, 6 aa, Artificial Sequence
  Synthetic construct
QSISSF

SEQ ID NO: 23570 - protein, 6 aa, Artificial Sequence
  Synthetic construct
QSVSSN

SEQ ID NO: 23571 - protein, 6 aa, Artificial Sequence
  Synthetic construct
QGISSF

SEQ ID NO: 23572 - protein, 8 aa, Artificial Sequence
  Synthetic construct
SSNIGKND

SEQ ID NO: 23573 - protein, 8 aa, Artificial Sequence
  Synthetic construct
SSDIGDIY

SEQ ID NO: 23574 - protein, 6 aa, Artificial Sequence
  Synthetic construct
QGISNY

SEQ ID NO: 23575 - protein, 6 aa, Artificial Sequence
  Synthetic construct
QDISNY

SEQ ID NO: 23576 - protein, 6 aa, Artificial Sequence
  Synthetic construct
QSVSSN

SEQ ID NO: 23577 - protein, 9 aa, Artificial Sequence
  Synthetic construct
SSDVGGYNY

SEQ ID NO: 23578 - protein, 6 aa, Artificial Sequence
  Synthetic construct
ALPKQY

SEQ ID NO: 23579 - protein, 9 aa, Artificial Sequence
  Synthetic construct
SSNIGAGYD

SEQ ID NO: 23580 - protein, 12 aa, Artificial Sequence
  Synthetic construct
QSVLYSSNNKNY

SEQ ID NO: 23581 - protein, 6 aa, Artificial Sequence
  Synthetic construct
QSISNY

SEQ ID NO: 23582 - protein, 6 aa, Artificial Sequence
  Synthetic construct
QSVGSN

SEQ ID NO: 23583 - protein, 8 aa, Artificial Sequence
  Synthetic construct
SSNVGTYY

SEQ ID NO: 23584 - protein, 6 aa, Artificial Sequence
  Synthetic construct
HIVSNY

SEQ ID NO: 23585 - protein, 6 aa, Artificial Sequence
  Synthetic construct
ALPKQY

SEQ ID NO: 23586 - protein, 6 aa, Artificial Sequence
  Synthetic construct
QSVSAY

SEQ ID NO: 23587 - protein, 6 aa, Artificial Sequence
  Synthetic construct
KLGDKD

SEQ ID NO: 23588 - protein, 6 aa, Artificial Sequence
  Synthetic construct
ALPKKY

SEQ ID NO: 23589 - protein, 8 aa, Artificial Sequence
  Synthetic construct
SSNVGYNY

SEQ ID NO: 23590 - protein, 7 aa, Artificial Sequence
  Synthetic construct
QTLSSSY

SEQ ID NO: 23591 - protein, 9 aa, Artificial Sequence
  Synthetic construct
SSDVGGYNY

SEQ ID NO: 23592 - protein, 6 aa, Artificial Sequence
  Synthetic construct
QSVSSN

SEQ ID NO: 23593 - protein, 6 aa, Artificial Sequence
  Synthetic construct
QSVSSY

SEQ ID NO: 23594 - protein, 7 aa, Artificial Sequence
  Synthetic construct
QSVSSSY

SEQ ID NO: 23595 - protein, 6 aa, Artificial Sequence
  Synthetic construct
QSISTW

SEQ ID NO: 23596 - protein, 8 aa, Artificial Sequence
  Synthetic construct
STNIGNNY

SEQ ID NO: 23597 - protein, 8 aa, Artificial Sequence
  Synthetic construct
NSNIGKNY

SEQ ID NO: 23598 - protein, 6 aa, Artificial Sequence
  Synthetic construct
QDISIY

SEQ ID NO: 23599 - protein, 6 aa, Artificial Sequence
  Synthetic construct
NIGGNS

SEQ ID NO: 23600 - protein, 7 aa, Artificial Sequence
  Synthetic construct
QSVSSTY

SEQ ID NO: 23601 - protein, 9 aa, Artificial Sequence
  Synthetic construct
SSDVGSYNL

SEQ ID NO: 23602 - protein, 6 aa, Artificial Sequence
  Synthetic construct
QSVSSF

SEQ ID NO: 23603 - protein, 6 aa, Artificial Sequence
  Synthetic construct
QSISSR

SEQ ID NO: 23604 - protein, 7 aa, Artificial Sequence
  Synthetic construct
QSVRSSS

SEQ ID NO: 23605 - protein, 6 aa, Artificial Sequence
  Synthetic construct
SLRGYY

SEQ ID NO: 23606 - protein, 9 aa, Artificial Sequence
  Synthetic construct
SNDVGGYYY

SEQ ID NO: 23607 - protein, 9 aa, Artificial Sequence
  Synthetic construct
SSDVGGYNY

SEQ ID NO: 23608 - protein, 7 aa, Artificial Sequence
  Synthetic construct
PSVYSVY

SEQ ID NO: 23609 - protein, 7 aa, Artificial Sequence
  Synthetic construct
QSVSSSY

SEQ ID NO: 23610 - protein, 12 aa, Artificial Sequence
  Synthetic construct
QSVLYSSNNKNY

SEQ ID NO: 23611 - protein, 6 aa, Artificial Sequence
  Synthetic construct
QGVSSS

SEQ ID NO: 23612 - protein, 6 aa, Artificial Sequence
  Synthetic construct
QSISSY

SEQ ID NO: 23613 - protein, 6 aa, Artificial Sequence
  Synthetic construct
QDINIY

SEQ ID NO: 23614 - protein, 6 aa, Artificial Sequence
  Synthetic construct
QSIGSS

SEQ ID NO: 23615 - protein, 7 aa, Artificial Sequence
  Synthetic construct
SGHSSYA

SEQ ID NO: 23616 - protein, 7 aa, Artificial Sequence
  Synthetic construct
QSVSSNY

SEQ ID NO: 23617 - protein, 6 aa, Artificial Sequence
  Synthetic construct
KLGDKD

SEQ ID NO: 23618 - protein, 6 aa, Artificial Sequence
  Synthetic construct
QSISGY

SEQ ID NO: 23619 - protein, 11 aa, Artificial Sequence
  Synthetic construct
QSLLYSNGYTY

SEQ ID NO: 23620 - protein, 4 aa, Artificial Sequence
  Synthetic construct
SSDV

SEQ ID NO: 23621 - protein, 6 aa, Artificial Sequence
  Synthetic construct
QSISTW

SEQ ID NO: 23622 - protein, 6 aa, Artificial Sequence
  Synthetic construct
QSVSSN

SEQ ID NO: 23623 - protein, 12 aa, Artificial Sequence
  Synthetic construct
QRVLHSSINKNY

SEQ ID NO: 23624 - protein, 6 aa, Artificial Sequence
  Synthetic construct
QSVSSS

SEQ ID NO: 23625 - protein, 12 aa, Artificial Sequence
  Synthetic construct
QSLLYNVNNKNY

SEQ ID NO: 23626 - protein, 9 aa, Artificial Sequence
  Synthetic construct
SSNIGAGYD

SEQ ID NO: 23627 - protein, 6 aa, Artificial Sequence
  Synthetic construct
QGIRND

SEQ ID NO: 23628 - protein, 6 aa, Artificial Sequence
  Synthetic construct
QGINSY

SEQ ID NO: 23629 - protein, 9 aa, Artificial Sequence
  Synthetic construct
SSDVGNYNL

SEQ ID NO: 23630 - protein, 7 aa, Artificial Sequence
  Synthetic construct
QSVSSSY

SEQ ID NO: 23631 - protein, 6 aa, Artificial Sequence
  Synthetic construct
QSVSSN

SEQ ID NO: 23632 - protein, 7 aa, Artificial Sequence
  Synthetic construct
QSVSSNY

SEQ ID NO: 23633 - protein, 6 aa, Artificial Sequence
  Synthetic construct
QSIRSY

SEQ ID NO: 23634 - protein, 6 aa, Artificial Sequence
  Synthetic construct
QSVSSF

SEQ ID NO: 23635 - protein, 6 aa, Artificial Sequence
  Synthetic construct
QSVSSD

SEQ ID NO: 23636 - protein, 7 aa, Artificial Sequence
  Synthetic construct
QAITSNY

SEQ ID NO: 23637 - protein, 6 aa, Artificial Sequence
  Synthetic construct
QDINIY

SEQ ID NO: 23638 - protein, 6 aa, Artificial Sequence
  Synthetic construct
QSVHSN

SEQ ID NO: 23639 - protein, 6 aa, Artificial Sequence
  Synthetic construct
KLGDKY

SEQ ID NO: 23640 - protein, 6 aa, Artificial Sequence
  Synthetic construct
QSITNF

SEQ ID NO: 23641 - protein, 6 aa, Artificial Sequence
  Synthetic construct
ALPKKY

SEQ ID NO: 23642 - protein, 7 aa, Artificial Sequence
  Synthetic construct
QSVSNNY

SEQ ID NO: 23643 - protein, 6 aa, Artificial Sequence
  Synthetic construct
QTVSSN

SEQ ID NO: 23644 - protein, 6 aa, Artificial Sequence
  Synthetic construct
QSVSSN

SEQ ID NO: 23645 - protein, 6 aa, Artificial Sequence
  Synthetic construct
NIGGKN

SEQ ID NO: 23646 - protein, 6 aa, Artificial Sequence
  Synthetic construct
QGISSW

SEQ ID NO: 23647 - protein, 9 aa, Artificial Sequence
  Synthetic construct
SSDVGSYDH

SEQ ID NO: 23648 - protein, 11 aa, Artificial Sequence
  Synthetic construct
QSLVYSDGNTY

SEQ ID NO: 23649 - protein, 9 aa, Artificial Sequence
  Synthetic construct
SSDVGSYNI

SEQ ID NO: 23650 - protein, 8 aa, Artificial Sequence
  Synthetic construct
SSNIGINY

SEQ ID NO: 23651 - protein, 6 aa, Artificial Sequence
  Synthetic construct
QSVTNF

SEQ ID NO: 23652 - protein, 6 aa, Artificial Sequence
  Synthetic construct
SLRSYY

SEQ ID NO: 23653 - protein, 9 aa, Artificial Sequence
  Synthetic construct
SSNIGAGYD

SEQ ID NO: 23654 - protein, 9 aa, Artificial Sequence
  Synthetic construct
SSNIGVGYD

SEQ ID NO: 23655 - protein, 7 aa, Artificial Sequence
  Synthetic construct
QSVNSSY

SEQ ID NO: 23656 - protein, 8 aa, Artificial Sequence
  Synthetic construct
SSNIGSHY

SEQ ID NO: 23657 - protein, 9 aa, Artificial Sequence
  Synthetic construct
SSDVGSYNL

SEQ ID NO: 23658 - protein, 6 aa, Artificial Sequence
  Synthetic construct
QSISSY

SEQ ID NO: 23659 - protein, 7 aa, Artificial Sequence
  Synthetic construct
QSVSSSF

SEQ ID NO: 23660 - protein, 6 aa, Artificial Sequence
  Synthetic construct
QSISTY

SEQ ID NO: 23661 - protein, 11 aa, Artificial Sequence
  Synthetic construct
QSLLHGDGKTY

SEQ ID NO: 23662 - protein, 7 aa, Artificial Sequence
  Synthetic construct
QSVSSIY

SEQ ID NO: 23663 - protein, 6 aa, Artificial Sequence
  Synthetic construct
ALPKQY

SEQ ID NO: 23664 - protein, 6 aa, Artificial Sequence
  Synthetic construct
QNVGSY

SEQ ID NO: 23665 - protein, 7 aa, Artificial Sequence
  Synthetic construct
QSVSSNY

SEQ ID NO: 23666 - protein, 6 aa, Artificial Sequence
  Synthetic construct
QSINNW

SEQ ID NO: 23667 - protein, 6 aa, Artificial Sequence
  Synthetic construct
ALPKKY

SEQ ID NO: 23668 - protein, 6 aa, Artificial Sequence
  Synthetic construct
QSMSSW

SEQ ID NO: 23669 - protein, 7 aa, Artificial Sequence
  Synthetic construct
SGHSSYA

SEQ ID NO: 23670 - protein, 6 aa, Artificial Sequence
  Synthetic construct
NIGSKS

SEQ ID NO: 23671 - protein, 6 aa, Artificial Sequence
  Synthetic construct
ALPKKY

SEQ ID NO: 23672 - protein, 6 aa, Artificial Sequence
  Synthetic construct
QSISSW

SEQ ID NO: 23673 - protein, 6 aa, Artificial Sequence
  Synthetic construct
QSVSTY

SEQ ID NO: 23674 - protein, 7 aa, Artificial Sequence
  Synthetic construct
QSVSSSY

SEQ ID NO: 23675 - protein, 6 aa, Artificial Sequence
  Synthetic construct
QYISNY

SEQ ID NO: 23676 - protein, 6 aa, Artificial Sequence
  Synthetic construct
QSVSSS

SEQ ID NO: 23677 - protein, 6 aa, Artificial Sequence
  Synthetic construct
QSISNF

SEQ ID NO: 23678 - protein, 6 aa, Artificial Sequence
  Synthetic construct
QGFSDY

SEQ ID NO: 23679 - protein, 6 aa, Artificial Sequence
  Synthetic construct
NFGSKS

SEQ ID NO: 23680 - protein, 8 aa, Artificial Sequence
  Synthetic construct
SSNIGKNY

SEQ ID NO: 23681 - protein, 6 aa, Artificial Sequence
  Synthetic construct
QSVSSN

SEQ ID NO: 23682 - protein, 9 aa, Artificial Sequence
  Synthetic construct
SSDVGSYDL

SEQ ID NO: 23683 - protein, 6 aa, Artificial Sequence
  Synthetic construct
NLGDKY

SEQ ID NO: 23684 - protein, 8 aa, Artificial Sequence
  Synthetic construct
SSNIGINP

SEQ ID NO: 23685 - protein, 12 aa, Artificial Sequence
  Synthetic construct
QSVFYSTKNQNY

SEQ ID NO: 23686 - protein, 12 aa, Artificial Sequence
  Synthetic construct
QSVLYNSNNKNY

SEQ ID NO: 23687 - protein, 6 aa, Artificial Sequence
  Synthetic construct
QSIGSS

SEQ ID NO: 23688 - protein, 12 aa, Artificial Sequence
  Synthetic construct
QSVLYSSNNKNY

SEQ ID NO: 23689 - protein, 9 aa, Artificial Sequence
  Synthetic construct
TSDVGSYNL

SEQ ID NO: 23690 - protein, 9 aa, Artificial Sequence
  Synthetic construct
SSDVGGYKY

SEQ ID NO: 23691 - protein, 6 aa, Artificial Sequence
  Synthetic construct
KLGDKY

SEQ ID NO: 23692 - protein, 11 aa, Artificial Sequence
  Synthetic construct
QSLLYSNGYTY

SEQ ID NO: 23693 - protein, 6 aa, Artificial Sequence
  Synthetic construct
QGISSW

SEQ ID NO: 23694 - protein, 6 aa, Artificial Sequence
  Synthetic construct
KLGDKY

SEQ ID NO: 23695 - protein, 6 aa, Artificial Sequence
  Synthetic construct
ALPKKY

SEQ ID NO: 23696 - protein, 9 aa, Artificial Sequence
  Synthetic construct
SSDVGSYNY

SEQ ID NO: 23697 - protein, 6 aa, Artificial Sequence
  Synthetic construct
ALPKQY

SEQ ID NO: 23698 - protein, 8 aa, Artificial Sequence
  Synthetic construct
SSNIAYNY

SEQ ID NO: 23699 - protein, 6 aa, Artificial Sequence
  Synthetic construct
KLGDKY

SEQ ID NO: 23700 - protein, 11 aa, Artificial Sequence
  Synthetic construct
QSLLHGDGKTY

SEQ ID NO: 23701 - protein, 11 aa, Artificial Sequence
  Synthetic construct
QSLLHRNGKHY

SEQ ID NO: 23702 - protein, 6 aa, Artificial Sequence
  Synthetic construct
QSVSSS

SEQ ID NO: 23703 - protein, 9 aa, Artificial Sequence
  Synthetic construct
NSNIGAGYD

SEQ ID NO: 23704 - protein, 12 aa, Artificial Sequence
  Synthetic construct
QSVLYSSNNKNY

SEQ ID NO: 23705 - protein, 6 aa, Artificial Sequence
  Synthetic construct
QDISNS

SEQ ID NO: 23706 - protein, 8 aa, Artificial Sequence
  Synthetic construct
NSNIETNA

SEQ ID NO: 23707 - protein, 11 aa, Artificial Sequence
  Synthetic construct
QSLLHSNGYNY

SEQ ID NO: 23708 - protein, 6 aa, Artificial Sequence
  Synthetic construct
QSVSNF

SEQ ID NO: 23709 - protein, 12 aa, Artificial Sequence
  Synthetic construct
QSVLYNSSNKNY

SEQ ID NO: 23710 - protein, 9 aa, Artificial Sequence
  Synthetic construct
SSDVGTYNR

SEQ ID NO: 23711 - protein, 8 aa, Artificial Sequence
  Synthetic construct
SSNIAYNY

SEQ ID NO: 23712 - protein, 11 aa, Artificial Sequence
  Synthetic construct
QSLLHSDGKTY

SEQ ID NO: 23713 - protein, 6 aa, Artificial Sequence
  Synthetic construct
KLGAKN

SEQ ID NO: 23714 - protein, 6 aa, Artificial Sequence
  Synthetic construct
QSVRIS

SEQ ID NO: 23715 - protein, 9 aa, Artificial Sequence
  Synthetic construct
SSDVGNYNY

SEQ ID NO: 23716 - protein, 6 aa, Artificial Sequence
  Synthetic construct
QSVSSF

SEQ ID NO: 23717 - protein, 6 aa, Artificial Sequence
  Synthetic construct
QNIGSW

SEQ ID NO: 23718 - protein, 9 aa, Artificial Sequence
  Synthetic construct
SSKIGAGYD

SEQ ID NO: 23719 - protein, 9 aa, Artificial Sequence
  Synthetic construct
SGAVTSAAY

SEQ ID NO: 23720 - protein, 7 aa, Artificial Sequence
  Synthetic construct
QSVSSSS

SEQ ID NO: 23721 - protein, 6 aa, Artificial Sequence
  Synthetic construct
QSVSSY

SEQ ID NO: 23722 - protein, 8 aa, Artificial Sequence
  Synthetic construct
SSNFGNNY

SEQ ID NO: 23723 - protein, 6 aa, Artificial Sequence
  Synthetic construct
QSVSSN

SEQ ID NO: 23724 - protein, 6 aa, Artificial Sequence
  Synthetic construct
QGIRND

SEQ ID NO: 23725 - protein, 6 aa, Artificial Sequence
  Synthetic construct
KLGNED

SEQ ID NO: 23726 - protein, 9 aa, Artificial Sequence
  Synthetic construct
SSNIGAGYD

SEQ ID NO: 23727 - protein, 6 aa, Artificial Sequence
  Synthetic construct
QSISSW

SEQ ID NO: 23728 - protein, 6 aa, Artificial Sequence
  Synthetic construct
QSINSY

SEQ ID NO: 23729 - protein, 6 aa, Artificial Sequence
  Synthetic construct
KLGDKY

SEQ ID NO: 23730 - protein, 6 aa, Artificial Sequence
  Synthetic construct
ALPKKY

SEQ ID NO: 23731 - protein, 6 aa, Artificial Sequence
  Synthetic construct
QSVGSN

SEQ ID NO: 23732 - protein, 6 aa, Artificial Sequence
  Synthetic construct
NIGSKN

SEQ ID NO: 23733 - protein, 6 aa, Artificial Sequence
  Synthetic construct
QSVSSY

SEQ ID NO: 23734 - protein, 6 aa, Artificial Sequence
  Synthetic construct
QSVSSN

SEQ ID NO: 23735 - protein, 9 aa, Artificial Sequence
  Synthetic construct
SSDVGAYNY

SEQ ID NO: 23736 - protein, 12 aa, Artificial Sequence
  Synthetic construct
QSVLYSSNNKNY

SEQ ID NO: 23737 - protein, 6 aa, Artificial Sequence
  Synthetic construct
QGIEND

SEQ ID NO: 23738 - protein, 6 aa, Artificial Sequence
  Synthetic construct
NFGGKN

SEQ ID NO: 23739 - protein, 6 aa, Artificial Sequence
  Synthetic construct
ALPKKY

SEQ ID NO: 23740 - protein, 6 aa, Artificial Sequence
  Synthetic construct
QGIRND

SEQ ID NO: 23741 - protein, 7 aa, Artificial Sequence
  Synthetic construct
QSVGSIY

SEQ ID NO: 23742 - protein, 6 aa, Artificial Sequence
  Synthetic construct
QTISSF

SEQ ID NO: 23743 - protein, 9 aa, Artificial Sequence
  Synthetic construct
SSDVGGYNY

SEQ ID NO: 23744 - protein, 6 aa, Artificial Sequence
  Synthetic construct
QSIRSH

SEQ ID NO: 23745 - protein, 12 aa, Artificial Sequence
  Synthetic construct
QSVLHSSNNKNY

SEQ ID NO: 23746 - protein, 6 aa, Artificial Sequence
  Synthetic construct
QSVSSD

SEQ ID NO: 23747 - protein, 8 aa, Artificial Sequence
  Synthetic construct
TSNIGNTY

SEQ ID NO: 23748 - protein, 8 aa, Artificial Sequence
  Synthetic construct
SSNIGSNH

SEQ ID NO: 23749 - protein, 6 aa, Artificial Sequence
  Synthetic construct
QGIRND

SEQ ID NO: 23750 - protein, 7 aa, Artificial Sequence
  Synthetic construct
QSVPGRN

SEQ ID NO: 23751 - protein, 6 aa, Artificial Sequence
  Synthetic construct
QGISDY

SEQ ID NO: 23752 - protein, 6 aa, Artificial Sequence
  Synthetic construct
KLGDKN

SEQ ID NO: 23753 - protein, 8 aa, Artificial Sequence
  Synthetic construct
SSNIGNNY

SEQ ID NO: 23754 - protein, 6 aa, Artificial Sequence
  Synthetic construct
QGISNY

SEQ ID NO: 23755 - protein, 9 aa, Artificial Sequence
  Synthetic construct
SSDVGNYNL

SEQ ID NO: 23756 - protein, 6 aa, Artificial Sequence
  Synthetic construct
ALPKKY

SEQ ID NO: 23757 - protein, 12 aa, Artificial Sequence
  Synthetic construct
QSVLHSSNNRNC

SEQ ID NO: 23758 - protein, 6 aa, Artificial Sequence
  Synthetic construct
ALPRKY

SEQ ID NO: 23759 - protein, 7 aa, Artificial Sequence
  Synthetic construct
QTFSSSY

SEQ ID NO: 23760 - protein, 6 aa, Artificial Sequence
  Synthetic construct
NIGGKS

SEQ ID NO: 23761 - protein, 8 aa, Artificial Sequence
  Synthetic construct
SSNIGSSI

SEQ ID NO: 23762 - protein, 6 aa, Artificial Sequence
  Synthetic construct
QGISNY

SEQ ID NO: 23763 - protein, 6 aa, Artificial Sequence
  Synthetic construct
NLGDKY

SEQ ID NO: 23764 - protein, 9 aa, Artificial Sequence
  Synthetic construct
SSNLGAGSD

SEQ ID NO: 23765 - protein, 9 aa, Artificial Sequence
  Synthetic construct
SSNIGAGYK

SEQ ID NO: 23766 - protein, 6 aa, Artificial Sequence
  Synthetic construct
KLGDKY

SEQ ID NO: 23767 - protein, 6 aa, Artificial Sequence
  Synthetic construct
QSISSY

SEQ ID NO: 23768 - protein, 6 aa, Artificial Sequence
  Synthetic construct
QSISSY

SEQ ID NO: 23769 - protein, 8 aa, Artificial Sequence
  Synthetic construct
SSNIGYNY

SEQ ID NO: 23770 - protein, 9 aa, Artificial Sequence
  Synthetic construct
GSNIGVGYD

SEQ ID NO: 23771 - protein, 11 aa, Artificial Sequence
  Synthetic construct
QSLLHGDGKTY

SEQ ID NO: 23772 - protein, 7 aa, Artificial Sequence
  Synthetic construct
QSVSSNY

SEQ ID NO: 23773 - protein, 6 aa, Artificial Sequence
  Synthetic construct
SLRTYS

SEQ ID NO: 23774 - protein, 9 aa, Artificial Sequence
  Synthetic construct
SSDVGGYDY

SEQ ID NO: 23775 - protein, 6 aa, Artificial Sequence
  Synthetic construct
ALPKKY

SEQ ID NO: 23776 - protein, 9 aa, Artificial Sequence
  Synthetic construct
SSNIGAGYD

SEQ ID NO: 23777 - protein, 6 aa, Artificial Sequence
  Synthetic construct
ALPKKY

SEQ ID NO: 23778 - protein, 9 aa, Artificial Sequence
  Synthetic construct
TGAVTSGHY

SEQ ID NO: 23779 - protein, 11 aa, Artificial Sequence
  Synthetic construct
QSLLHSDGKTY

SEQ ID NO: 23780 - protein, 6 aa, Artificial Sequence
  Synthetic construct
QSVSSF

SEQ ID NO: 23781 - protein, 6 aa, Artificial Sequence
  Synthetic construct
QSISTY

SEQ ID NO: 23782 - protein, 7 aa, Artificial Sequence
  Synthetic construct
QSVSSTY

SEQ ID NO: 23783 - protein, 11 aa, Artificial Sequence
  Synthetic construct
QSLLHSDGKTY

SEQ ID NO: 23784 - protein, 6 aa, Artificial Sequence
  Synthetic construct
HDISIY

SEQ ID NO: 23785 - protein, 6 aa, Artificial Sequence
  Synthetic construct
HSVRTN

SEQ ID NO: 23786 - protein, 6 aa, Artificial Sequence
  Synthetic construct
QSISSY

SEQ ID NO: 23787 - protein, 6 aa, Artificial Sequence
  Synthetic construct
QSISSW

SEQ ID NO: 23788 - protein, 6 aa, Artificial Sequence
  Synthetic construct
QSISSY

SEQ ID NO: 23789 - protein, 8 aa, Artificial Sequence
  Synthetic construct
SSNIGNNY

SEQ ID NO: 23790 - protein, 8 aa, Artificial Sequence
  Synthetic construct
SSNIGNNY

SEQ ID NO: 23791 - protein, 9 aa, Artificial Sequence
  Synthetic construct
SSNIGAGYD

SEQ ID NO: 23792 - protein, 12 aa, Artificial Sequence
  Synthetic construct
QSVLYSSINKDY

SEQ ID NO: 23793 - protein, 6 aa, Artificial Sequence
  Synthetic construct
QGISRN

SEQ ID NO: 23794 - protein, 7 aa, Artificial Sequence
  Synthetic construct
QSVSNNY

SEQ ID NO: 23795 - protein, 6 aa, Artificial Sequence
  Synthetic construct
QDINKY

SEQ ID NO: 23796 - protein, 7 aa, Artificial Sequence
  Synthetic construct
QSVSSNY

SEQ ID NO: 23797 - protein, 6 aa, Artificial Sequence
  Synthetic construct
SLRTYY

SEQ ID NO: 23798 - protein, 8 aa, Artificial Sequence
  Synthetic construct
SGNIASNY

SEQ ID NO: 23799 - protein, 6 aa, Artificial Sequence
  Synthetic construct
ALPKKY

SEQ ID NO: 23800 - protein, 6 aa, Artificial Sequence
  Synthetic construct
ALSKKY

SEQ ID NO: 23801 - protein, 7 aa, Artificial Sequence
  Synthetic construct
QSVSSSY

SEQ ID NO: 23802 - protein, 6 aa, Artificial Sequence
  Synthetic construct
QSVSSN

SEQ ID NO: 23803 - protein, 9 aa, Artificial Sequence
  Synthetic construct
SSDLSGYNY

SEQ ID NO: 23804 - protein, 9 aa, Artificial Sequence
  Synthetic construct
SDIDVGTFR

SEQ ID NO: 23805 - protein, 6 aa, Artificial Sequence
  Synthetic construct
QGISSY

SEQ ID NO: 23806 - protein, 11 aa, Artificial Sequence
  Synthetic construct
QSLLHSNGYNY

SEQ ID NO: 23807 - protein, 9 aa, Artificial Sequence
  Synthetic construct
SSDVGAYNY

SEQ ID NO: 23808 - protein, 6 aa, Artificial Sequence
  Synthetic construct
QSISSY

SEQ ID NO: 23809 - protein, 8 aa, Artificial Sequence
  Synthetic construct
SSNIGSNS

SEQ ID NO: 23810 - protein, 8 aa, Artificial Sequence
  Synthetic construct
SSNIGNNY

SEQ ID NO: 23811 - protein, 6 aa, Artificial Sequence
  Synthetic construct
QSISSY

SEQ ID NO: 23812 - protein, 9 aa, Artificial Sequence
  Synthetic construct
SSNIGAGYA

SEQ ID NO: 23813 - protein, 6 aa, Artificial Sequence
  Synthetic construct
NIGSNS

SEQ ID NO: 23814 - protein, 6 aa, Artificial Sequence
  Synthetic construct
QSVRSN

SEQ ID NO: 23815 - protein, 6 aa, Artificial Sequence
  Synthetic construct
QSVSSN

SEQ ID NO: 23816 - protein, 7 aa, Artificial Sequence
  Synthetic construct
QSLGSIY

SEQ ID NO: 23817 - protein, 9 aa, Artificial Sequence
  Synthetic construct
SSDVGGYNY

SEQ ID NO: 23818 - protein, 9 aa, Artificial Sequence
  Synthetic construct
SNDVGAYNY

SEQ ID NO: 23819 - protein, 6 aa, Artificial Sequence
  Synthetic construct
KLGDKY

SEQ ID NO: 23820 - protein, 7 aa, Artificial Sequence
  Synthetic construct
QSVGSRF

SEQ ID NO: 23821 - protein, 9 aa, Artificial Sequence
  Synthetic construct
SSDVDGHNY

SEQ ID NO: 23822 - protein, 6 aa, Artificial Sequence
  Synthetic construct
ALPKKY

SEQ ID NO: 23823 - protein, 6 aa, Artificial Sequence
  Synthetic construct
KLGDKY

SEQ ID NO: 23824 - protein, 6 aa, Artificial Sequence
  Synthetic construct
QSITSS

SEQ ID NO: 23825 - protein, 6 aa, Artificial Sequence
  Synthetic construct
ALPKKY

SEQ ID NO: 23826 - protein, 9 aa, Artificial Sequence
  Synthetic construct
SSDVGVYNF

SEQ ID NO: 23827 - protein, 11 aa, Artificial Sequence
  Synthetic construct
QSLLHSDGKTY

SEQ ID NO: 23828 - protein, 11 aa, Artificial Sequence
  Synthetic construct
QSLLHSDGKTS

SEQ ID NO: 23829 - protein, 9 aa, Artificial Sequence
  Synthetic construct
TGAVTSGHY

SEQ ID NO: 23830 - protein, 6 aa, Artificial Sequence
  Synthetic construct
QSASNY

SEQ ID NO: 23831 - protein, 6 aa, Artificial Sequence
  Synthetic construct
QSISSK

SEQ ID NO: 23832 - protein, 6 aa, Artificial Sequence
  Synthetic construct
QDISNY

SEQ ID NO: 23833 - protein, 9 aa, Artificial Sequence
  Synthetic construct
GSDVGAYNS

SEQ ID NO: 23834 - protein, 6 aa, Artificial Sequence
  Synthetic construct
QTISSW

SEQ ID NO: 23835 - protein, 6 aa, Artificial Sequence
  Synthetic construct
QSISSY

SEQ ID NO: 23836 - protein, 6 aa, Artificial Sequence
  Synthetic construct
QSIGTS

SEQ ID NO: 23837 - protein, 6 aa, Artificial Sequence
  Synthetic construct
KLGDEN

SEQ ID NO: 23838 - protein, 6 aa, Artificial Sequence
  Synthetic construct
NIGSKS

SEQ ID NO: 23839 - protein, 3 aa, Artificial Sequence
  Synthetic construct
  MISC_FEATURE (1)..(3): X can be any amino acid
XXX

SEQ ID NO: 23840 - protein, 9 aa, Artificial Sequence
  Synthetic construct
SRDVGYYNY

SEQ ID NO: 23841 - protein, 6 aa, Artificial Sequence
  Synthetic construct
NIGSKS

SEQ ID NO: 23842 - protein, 11 aa, Artificial Sequence
  Synthetic construct
QSLLHSNGYNY

SEQ ID NO: 23843 - protein, 9 aa, Artificial Sequence
  Synthetic construct
SSDVGGYEY

SEQ ID NO: 23844 - protein, 6 aa, Artificial Sequence
  Synthetic construct
KLGDKY

SEQ ID NO: 23845 - protein, 7 aa, Artificial Sequence
  Synthetic construct
QSVSSNY

SEQ ID NO: 23846 - protein, 6 aa, Artificial Sequence
  Synthetic construct
QSISRY

SEQ ID NO: 23847 - protein, 6 aa, Artificial Sequence
  Synthetic construct
QSISSW

SEQ ID NO: 23848 - protein, 6 aa, Artificial Sequence
  Synthetic construct
QSISSY

SEQ ID NO: 23849 - protein, 6 aa, Artificial Sequence
  Synthetic construct
QSVSSY

SEQ ID NO: 23850 - protein, 9 aa, Artificial Sequence
  Synthetic construct
SSDVGGYNL

SEQ ID NO: 23851 - protein, 8 aa, Artificial Sequence
  Synthetic construct
SSNIGNDY

SEQ ID NO: 23852 - protein, 8 aa, Artificial Sequence
  Synthetic construct
SSNIGNNY

SEQ ID NO: 23853 - protein, 9 aa, Artificial Sequence
  Synthetic construct
STDVGSYNL

SEQ ID NO: 23854 - protein, 8 aa, Artificial Sequence
  Synthetic construct
SSNVGTYY

SEQ ID NO: 23855 - protein, 8 aa, Artificial Sequence
  Synthetic construct
SSNIGSST

SEQ ID NO: 23856 - protein, 6 aa, Artificial Sequence
  Synthetic construct
QGISRN

SEQ ID NO: 23857 - protein, 7 aa, Artificial Sequence
  Synthetic construct
QSVSSSY

SEQ ID NO: 23858 - protein, 6 aa, Artificial Sequence
  Synthetic construct
QTFSTS

SEQ ID NO: 23859 - protein, 6 aa, Artificial Sequence
  Synthetic construct
QGIRHD

SEQ ID NO: 23860 - protein, 8 aa, Artificial Sequence
  Synthetic construct
SSNIGSSI

SEQ ID NO: 23861 - protein, 6 aa, Artificial Sequence
  Synthetic construct
QSINNY

SEQ ID NO: 23862 - protein, 6 aa, Artificial Sequence
  Synthetic construct
QAINSW

SEQ ID NO: 23863 - protein, 9 aa, Artificial Sequence
  Synthetic construct
SSDVGGYKY

SEQ ID NO: 23864 - protein, 6 aa, Artificial Sequence
  Synthetic construct
GLPKKY

SEQ ID NO: 23865 - protein, 7 aa, Artificial Sequence
  Synthetic construct
SGYSNYK

SEQ ID NO: 23866 - protein, 8 aa, Artificial Sequence
  Synthetic construct
SSDIGDIY

SEQ ID NO: 23867 - protein, 6 aa, Artificial Sequence
  Synthetic construct
ALPKKY

SEQ ID NO: 23868 - protein, 6 aa, Artificial Sequence
  Synthetic construct
QTISTY

SEQ ID NO: 23869 - protein, 11 aa, Artificial Sequence
  Synthetic construct
QSLLHSNGHNY

SEQ ID NO: 23870 - protein, 6 aa, Artificial Sequence
  Synthetic construct
QSVSSY

SEQ ID NO: 23871 - protein, 9 aa, Artificial Sequence
  Synthetic construct
SSDVGAYNY

SEQ ID NO: 23872 - protein, 6 aa, Artificial Sequence
  Synthetic construct
ALPKQY

SEQ ID NO: 23873 - protein, 6 aa, Artificial Sequence
  Synthetic construct
ALPKKY

SEQ ID NO: 23874 - protein, 6 aa, Artificial Sequence
  Synthetic construct
QSVSSN

SEQ ID NO: 23875 - protein, 6 aa, Artificial Sequence
  Synthetic construct
ALPKKY

SEQ ID NO: 23876 - protein, 6 aa, Artificial Sequence
  Synthetic construct
QSIANA

SEQ ID NO: 23877 - protein, 6 aa, Artificial Sequence
  Synthetic construct
QDISKY

SEQ ID NO: 23878 - protein, 6 aa, Artificial Sequence
  Synthetic construct
QGIRND

SEQ ID NO: 23879 - protein, 6 aa, Artificial Sequence
  Synthetic construct
ALPRKY

SEQ ID NO: 23880 - protein, 9 aa, Artificial Sequence
  Synthetic construct
SSNIGAGYD

SEQ ID NO: 23881 - protein, 7 aa, Artificial Sequence
  Synthetic construct
QSVSGTY

SEQ ID NO: 23882 - protein, 6 aa, Artificial Sequence
  Synthetic construct
QSISSW

SEQ ID NO: 23883 - protein, 11 aa, Artificial Sequence
  Synthetic construct
QSLVHSDGNTY

SEQ ID NO: 23884 - protein, 9 aa, Artificial Sequence
  Synthetic construct
SSNIGAGYD

SEQ ID NO: 23885 - protein, 6 aa, Artificial Sequence
  Synthetic construct
QDIRNY

SEQ ID NO: 23886 - protein, 7 aa, Artificial Sequence
  Synthetic construct
QSVSSSY

SEQ ID NO: 23887 - protein, 7 aa, Artificial Sequence
  Synthetic construct
QSVSSNY

SEQ ID NO: 23888 - protein, 7 aa, Artificial Sequence
  Synthetic construct
LSVTGSD

SEQ ID NO: 23889 - protein, 8 aa, Artificial Sequence
  Synthetic construct
SSNIGSNY

SEQ ID NO: 23890 - protein, 6 aa, Artificial Sequence
  Synthetic construct
QSITSY

SEQ ID NO: 23891 - protein, 6 aa, Artificial Sequence
  Synthetic construct
ALPKKY

SEQ ID NO: 23892 - protein, 11 aa, Artificial Sequence
  Synthetic construct
QSLLHSDGKTY

SEQ ID NO: 23893 - protein, 7 aa, Artificial Sequence
  Synthetic construct
QTVSSNF

SEQ ID NO: 23894 - protein, 6 aa, Artificial Sequence
  Synthetic construct
QGISSW

SEQ ID NO: 23895 - protein, 6 aa, Artificial Sequence
  Synthetic construct
QSVSSY

SEQ ID NO: 23896 - protein, 6 aa, Artificial Sequence
  Synthetic construct
QSVSSF

SEQ ID NO: 23897 - protein, 6 aa, Artificial Sequence
  Synthetic construct
QSASTF

SEQ ID NO: 23898 - protein, 6 aa, Artificial Sequence
  Synthetic construct
QSITTW

SEQ ID NO: 23899 - protein, 6 aa, Artificial Sequence
  Synthetic construct
QSISSY

SEQ ID NO: 23900 - protein, 9 aa, Artificial Sequence
  Synthetic construct
SSDVGGNDY

SEQ ID NO: 23901 - protein, 7 aa, Artificial Sequence
  Synthetic construct
QSVSSSH

SEQ ID NO: 23902 - protein, 9 aa, Artificial Sequence
  Synthetic construct
SSNIGAGFD

SEQ ID NO: 23903 - protein, 9 aa, Artificial Sequence
  Synthetic construct
SSDVGSYNL

SEQ ID NO: 23904 - protein, 7 aa, Artificial Sequence
  Synthetic construct
QSVTSNY

SEQ ID NO: 23905 - protein, 6 aa, Artificial Sequence
  Synthetic construct
KLGDKY

SEQ ID NO: 23906 - protein, 8 aa, Artificial Sequence
  Synthetic construct
SSNIGYHY

SEQ ID NO: 23907 - protein, 6 aa, Artificial Sequence
  Synthetic construct
KLGDKY

SEQ ID NO: 23908 - protein, 6 aa, Artificial Sequence
  Synthetic construct
SLRNYY

SEQ ID NO: 23909 - protein, 6 aa, Artificial Sequence
  Synthetic construct
ALPKKY

SEQ ID NO: 23910 - protein, 9 aa, Artificial Sequence
  Synthetic construct
SSNIGAGYD

SEQ ID NO: 23911 - protein, 6 aa, Artificial Sequence
  Synthetic construct
QAITNS

SEQ ID NO: 23912 - protein, 6 aa, Artificial Sequence
  Synthetic construct
QSVSNF

SEQ ID NO: 23913 - protein, 9 aa, Artificial Sequence
  Synthetic construct
SSDVGGYNY

SEQ ID NO: 23914 - protein, 11 aa, Artificial Sequence
  Synthetic construct
QSLLHSNGNHY

SEQ ID NO: 23915 - protein, 12 aa, Artificial Sequence
  Synthetic construct
QSVLHSSNNRNC

SEQ ID NO: 23916 - protein, 6 aa, Artificial Sequence
  Synthetic construct
QSVGSS

SEQ ID NO: 23917 - protein, 8 aa, Artificial Sequence
  Synthetic construct
NSNIGSNT

SEQ ID NO: 23918 - protein, 6 aa, Artificial Sequence
  Synthetic construct
QSVSSY

SEQ ID NO: 23919 - protein, 12 aa, Artificial Sequence
  Synthetic construct
QSVLSSSNNKNS

SEQ ID NO: 23920 - protein, 9 aa, Artificial Sequence
  Synthetic construct
SSDVGGYNY

SEQ ID NO: 23921 - protein, 6 aa, Artificial Sequence
  Synthetic construct
QSISSW

SEQ ID NO: 23922 - protein, 9 aa, Artificial Sequence
  Synthetic construct
SSDIGRYSY

SEQ ID NO: 23923 - protein, 9 aa, Artificial Sequence
  Synthetic construct
SSDVGSYNY

SEQ ID NO: 23924 - protein, 9 aa, Artificial Sequence
  Synthetic construct
SGDFGAYNY

SEQ ID NO: 23925 - protein, 9 aa, Artificial Sequence
  Synthetic construct
SSDVGSYDH

SEQ ID NO: 23926 - protein, 9 aa, Artificial Sequence
  Synthetic construct
SSNIGAGYD

SEQ ID NO: 23927 - protein, 6 aa, Artificial Sequence
  Synthetic construct
QSVSSN

SEQ ID NO: 23928 - protein, 6 aa, Artificial Sequence
  Synthetic construct
KLGETD

SEQ ID NO: 23929 - protein, 11 aa, Artificial Sequence
  Synthetic construct
QSLVYSDGNTY

SEQ ID NO: 23930 - protein, 6 aa, Artificial Sequence
  Synthetic construct
QSISSY

SEQ ID NO: 23931 - protein, 9 aa, Artificial Sequence
  Synthetic construct
SSDVGAYNY

SEQ ID NO: 23932 - protein, 6 aa, Artificial Sequence
  Synthetic construct
ALPKKY

SEQ ID NO: 23933 - protein, 8 aa, Artificial Sequence
  Synthetic construct
SSNIGRNY

SEQ ID NO: 23934 - protein, 8 aa, Artificial Sequence
  Synthetic construct
SSNIGSSI

SEQ ID NO: 23935 - protein, 6 aa, Artificial Sequence
  Synthetic construct
QSVSSF

SEQ ID NO: 23936 - protein, 9 aa, Artificial Sequence
  Synthetic construct
SSNIGAGYD

SEQ ID NO: 23937 - protein, 6 aa, Artificial Sequence
  Synthetic construct
KLGDKY

SEQ ID NO: 23938 - protein, 11 aa, Artificial Sequence
  Synthetic construct
QSLLHGDGKTY

SEQ ID NO: 23939 - protein, 9 aa, Artificial Sequence
  Synthetic construct
SSDIGSYNL

SEQ ID NO: 23940 - protein, 11 aa, Artificial Sequence
  Synthetic construct
QSLLHSDGKTY

SEQ ID NO: 23941 - protein, 9 aa, Artificial Sequence
  Synthetic construct
SSDVGSSNL

SEQ ID NO: 23942 - protein, 6 aa, Artificial Sequence
  Synthetic construct
ALPKKY

SEQ ID NO: 23943 - protein, 9 aa, Artificial Sequence
  Synthetic construct
SSYVGSFDL

SEQ ID NO: 23944 - protein, 7 aa, Artificial Sequence
  Synthetic construct
QSVSSNY

SEQ ID NO: 23945 - protein, 12 aa, Artificial Sequence
  Synthetic construct
QSVLLSSNNKNY

SEQ ID NO: 23946 - protein, 11 aa, Artificial Sequence
  Synthetic construct
QSLLHSNGYNY

SEQ ID NO: 23947 - protein, 6 aa, Artificial Sequence
  Synthetic construct
QSIGSS

SEQ ID NO: 23948 - protein, 6 aa, Artificial Sequence
  Synthetic construct
QGISSS

SEQ ID NO: 23949 - protein, 8 aa, Artificial Sequence
  Synthetic construct
SSNIGSNT

SEQ ID NO: 23950 - protein, 8 aa, Artificial Sequence
  Synthetic construct
SSNIGNNH

SEQ ID NO: 23951 - protein, 6 aa, Artificial Sequence
  Synthetic construct
QSVSTF

SEQ ID NO: 23952 - protein, 12 aa, Artificial Sequence
  Synthetic construct
QNVFYSSDNKNY

SEQ ID NO: 23953 - protein, 6 aa, Artificial Sequence
  Synthetic construct
ALPKKD

SEQ ID NO: 23954 - protein, 7 aa, Artificial Sequence
  Synthetic construct
QSVSSTY

SEQ ID NO: 23955 - protein, 6 aa, Artificial Sequence
  Synthetic construct
QDISSF

SEQ ID NO: 23956 - protein, 7 aa, Artificial Sequence
  Synthetic construct
QSVSSSY

SEQ ID NO: 23957 - protein, 6 aa, Artificial Sequence
  Synthetic construct
QGIRND

SEQ ID NO: 23958 - protein, 12 aa, Artificial Sequence
  Synthetic construct
QSLLASDDGNTY

SEQ ID NO: 23959 - protein, 6 aa, Artificial Sequence
  Synthetic construct
QSISSY

SEQ ID NO: 23960 - protein, 6 aa, Artificial Sequence
  Synthetic construct
ALPKKY

SEQ ID NO: 23961 - protein, 6 aa, Artificial Sequence
  Synthetic construct
QDISNY

SEQ ID NO: 23962 - protein, 6 aa, Artificial Sequence
  Synthetic construct
QSISSY

SEQ ID NO: 23963 - protein, 7 aa, Artificial Sequence
  Synthetic construct
QSVSGTY

SEQ ID NO: 23964 - protein, 6 aa, Artificial Sequence
  Synthetic construct
QSVSSY

SEQ ID NO: 23965 - protein, 11 aa, Artificial Sequence
  Synthetic construct
QSLLHSNGYKY

SEQ ID NO: 23966 - protein, 7 aa, Artificial Sequence
  Synthetic construct
QSISSGY

SEQ ID NO: 23967 - protein, 12 aa, Artificial Sequence
  Synthetic construct
QSVLYSSNNKNY

SEQ ID NO: 23968 - protein, 7 aa, Artificial Sequence
  Synthetic construct
QSVSRNY

SEQ ID NO: 23969 - protein, 8 aa, Artificial Sequence
  Synthetic construct
SSNIGSNY

SEQ ID NO: 23970 - protein, 6 aa, Artificial Sequence
  Synthetic construct
QDISIY

SEQ ID NO: 23971 - protein, 6 aa, Artificial Sequence
  Synthetic construct
QSISSF

SEQ ID NO: 23972 - protein, 6 aa, Artificial Sequence
  Synthetic construct
QSVSSF

SEQ ID NO: 23973 - protein, 7 aa, Artificial Sequence
  Synthetic construct
QSVSSSQ

SEQ ID NO: 23974 - protein, 6 aa, Artificial Sequence
  Synthetic construct
QSVSNY

SEQ ID NO: 23975 - protein, 8 aa, Artificial Sequence
  Synthetic construct
NSNIGNNY

SEQ ID NO: 23976 - protein, 9 aa, Artificial Sequence
  Synthetic construct
SSDVGGYNY

SEQ ID NO: 23977 - protein, 6 aa, Artificial Sequence
  Synthetic construct
ALPKKY

SEQ ID NO: 23978 - protein, 6 aa, Artificial Sequence
  Synthetic construct
QSISSY

SEQ ID NO: 23979 - protein, 6 aa, Artificial Sequence
  Synthetic construct
QSISSY

SEQ ID NO: 23980 - protein, 9 aa, Artificial Sequence
  Synthetic construct
NSNIGAGYD

SEQ ID NO: 23981 - protein, 6 aa, Artificial Sequence
  Synthetic construct
QSVSSS

SEQ ID NO: 23982 - protein, 6 aa, Artificial Sequence
  Synthetic construct
QSVSNN

SEQ ID NO: 23983 - protein, 6 aa, Artificial Sequence
  Synthetic construct
QGISRF

SEQ ID NO: 23984 - protein, 7 aa, Artificial Sequence
  Synthetic construct
QSVSSSY

SEQ ID NO: 23985 - protein, 9 aa, Artificial Sequence
  Synthetic construct
SSDVGSYNL

SEQ ID NO: 23986 - protein, 9 aa, Artificial Sequence
  Synthetic construct
SSNIGAGFD

SEQ ID NO: 23987 - protein, 6 aa, Artificial Sequence
  Synthetic construct
QGIRND

SEQ ID NO: 23988 - protein, 8 aa, Artificial Sequence
  Synthetic construct
SSDIGNNY

SEQ ID NO: 23989 - protein, 7 aa, Artificial Sequence
  Synthetic construct
QSVSSSN

SEQ ID NO: 23990 - protein, 6 aa, Artificial Sequence
  Synthetic construct
QSISTY

SEQ ID NO: 23991 - protein, 6 aa, Artificial Sequence
  Synthetic construct
QSISNY

SEQ ID NO: 23992 - protein, 11 aa, Artificial Sequence
  Synthetic construct
QSLVYSDGNTY

SEQ ID NO: 23993 - protein, 8 aa, Artificial Sequence
  Synthetic construct
SSNIGSNT

SEQ ID NO: 23994 - protein, 11 aa, Artificial Sequence
  Synthetic construct
QSLLHSNGYNY

SEQ ID NO: 23995 - protein, 12 aa, Artificial Sequence
  Synthetic construct
QSVLFSSNNKNY

SEQ ID NO: 23996 - protein, 8 aa, Artificial Sequence
  Synthetic construct
SSNIGNNA

SEQ ID NO: 23997 - protein, 6 aa, Artificial Sequence
  Synthetic construct
ALPKKY

SEQ ID NO: 23998 - protein, 6 aa, Artificial Sequence
  Synthetic construct
KLGDKY

SEQ ID NO: 23999 - protein, 11 aa, Artificial Sequence
  Synthetic construct
QSLLHGDGKTY

SEQ ID NO: 24000 - protein, 6 aa, Artificial Sequence
  Synthetic construct
QSVSSY

SEQ ID NO: 24001 - protein, 6 aa, Artificial Sequence
  Synthetic construct
QGISSY

SEQ ID NO: 24002 - protein, 8 aa, Artificial Sequence
  Synthetic construct
TSNIGSNY

SEQ ID NO: 24003 - protein, 6 aa, Artificial Sequence
  Synthetic construct
NIGSKS

SEQ ID NO: 24004 - protein, 6 aa, Artificial Sequence
  Synthetic construct
QSVGSY

SEQ ID NO: 24005 - protein, 6 aa, Artificial Sequence
  Synthetic construct
QNISNY

SEQ ID NO: 24006 - protein, 12 aa, Artificial Sequence
  Synthetic construct
QSVLYSSNNKNY

SEQ ID NO: 24007 - protein, 7 aa, Artificial Sequence
  Synthetic construct
QSVGSSY

SEQ ID NO: 24008 - protein, 6 aa, Artificial Sequence
  Synthetic construct
QSISNY

SEQ ID NO: 24009 - protein, 6 aa, Artificial Sequence
  Synthetic construct
NFGSKS

SEQ ID NO: 24010 - protein, 6 aa, Artificial Sequence
  Synthetic construct
ESISRW

SEQ ID NO: 24011 - protein, 6 aa, Artificial Sequence
  Synthetic construct
QSISSY

SEQ ID NO: 24012 - protein, 6 aa, Artificial Sequence
  Synthetic construct
NIGSKS

SEQ ID NO: 24013 - protein, 6 aa, Artificial Sequence
  Synthetic construct
QDIRND

SEQ ID NO: 24014 - protein, 6 aa, Artificial Sequence
  Synthetic construct
KLGDKY

SEQ ID NO: 24015 - protein, 6 aa, Artificial Sequence
  Synthetic construct
QSISSY

SEQ ID NO: 24016 - protein, 6 aa, Artificial Sequence
  Synthetic construct
QSISSY

SEQ ID NO: 24017 - protein, 6 aa, Artificial Sequence
  Synthetic construct
QDIASW

SEQ ID NO: 24018 - protein, 9 aa, Artificial Sequence
  Synthetic construct
TGAVTSGHY

SEQ ID NO: 24019 - protein, 6 aa, Artificial Sequence
  Synthetic construct
QSVSSN

SEQ ID NO: 24020 - protein, 9 aa, Artificial Sequence
  Synthetic construct
NSDVGSYDH

SEQ ID NO: 24021 - protein, 6 aa, Artificial Sequence
  Synthetic construct
QGIRND

SEQ ID NO: 24022 - protein, 12 aa, Artificial Sequence
  Synthetic construct
QSVLYSSNNKNF

SEQ ID NO: 24023 - protein, 9 aa, Artificial Sequence
  Synthetic construct
SSDVGSYNI

SEQ ID NO: 24024 - protein, 6 aa, Artificial Sequence
  Synthetic construct
QDISNY

SEQ ID NO: 24025 - protein, 6 aa, Artificial Sequence
  Synthetic construct
QDISVS

SEQ ID NO: 24026 - protein, 7 aa, Artificial Sequence
  Synthetic construct
QSVSSSY

SEQ ID NO: 24027 - protein, 9 aa, Artificial Sequence
  Synthetic construct
SSDVGGYNY

SEQ ID NO: 24028 - protein, 6 aa, Artificial Sequence
  Synthetic construct
SIGSKS

SEQ ID NO: 24029 - protein, 6 aa, Artificial Sequence
  Synthetic construct
QSIGST

SEQ ID NO: 24030 - protein, 6 aa, Artificial Sequence
  Synthetic construct
QGISNY

SEQ ID NO: 24031 - protein, 6 aa, Artificial Sequence
  Synthetic construct
KLGDKY

SEQ ID NO: 24032 - protein, 6 aa, Artificial Sequence
  Synthetic construct
QSVGSN

SEQ ID NO: 24033 - protein, 6 aa, Artificial Sequence
  Synthetic construct
ALPKQY

SEQ ID NO: 24034 - protein, 6 aa, Artificial Sequence
  Synthetic construct
QSVSSY

SEQ ID NO: 24035 - protein, 9 aa, Artificial Sequence
  Synthetic construct
TGAVTSGHY

SEQ ID NO: 24036 - protein, 7 aa, Artificial Sequence
  Synthetic construct
QSVSSSY

SEQ ID NO: 24037 - protein, 6 aa, Artificial Sequence
  Synthetic construct
QSVSSY

SEQ ID NO: 24038 - protein, 9 aa, Artificial Sequence
  Synthetic construct
SSDVGSYNL

SEQ ID NO: 24039 - protein, 6 aa, Artificial Sequence
  Synthetic construct
KLGDKY

SEQ ID NO: 24040 - protein, 6 aa, Artificial Sequence
  Synthetic construct
QSFTSN

SEQ ID NO: 24041 - protein, 9 aa, Artificial Sequence
  Synthetic construct
SSDVGGYSY

SEQ ID NO: 24042 - protein, 9 aa, Artificial Sequence
  Synthetic construct
SSDVGGDNY

SEQ ID NO: 24043 - protein, 6 aa, Artificial Sequence
  Synthetic construct
LGISNW

SEQ ID NO: 24044 - protein, 9 aa, Artificial Sequence
  Synthetic construct
SSDVGSYNL

SEQ ID NO: 24045 - protein, 9 aa, Artificial Sequence
  Synthetic construct
GSNIGVGYD

SEQ ID NO: 24046 - protein, 6 aa, Artificial Sequence
  Synthetic construct
QSVSNY

SEQ ID NO: 24047 - protein, 6 aa, Artificial Sequence
  Synthetic construct
QGISSW

SEQ ID NO: 24048 - protein, 7 aa, Artificial Sequence
  Synthetic construct
QSVGSSY

SEQ ID NO: 24049 - protein, 6 aa, Artificial Sequence
  Synthetic construct
NIGSNT

SEQ ID NO: 24050 - protein, 7 aa, Artificial Sequence
  Synthetic construct
QSVGSSY

SEQ ID NO: 24051 - protein, 6 aa, Artificial Sequence
  Synthetic construct
QSVSSS

SEQ ID NO: 24052 - protein, 7 aa, Artificial Sequence
  Synthetic construct
QSVGSLY

SEQ ID NO: 24053 - protein, 6 aa, Artificial Sequence
  Synthetic construct
NIGSKS

SEQ ID NO: 24054 - protein, 9 aa, Artificial Sequence
  Synthetic construct
SSNIGAGYD

SEQ ID NO: 24055 - protein, 6 aa, Artificial Sequence
  Synthetic construct
QNINIY

SEQ ID NO: 24056 - protein, 9 aa, Artificial Sequence
  Synthetic construct
SSDVGYYNH

SEQ ID NO: 24057 - protein, 6 aa, Artificial Sequence
  Synthetic construct
QGIRND

SEQ ID NO: 24058 - protein, 6 aa, Artificial Sequence
  Synthetic construct
QSVSNY

SEQ ID NO: 24059 - protein, 6 aa, Artificial Sequence
  Synthetic construct
QGISSW

SEQ ID NO: 24060 - protein, 6 aa, Artificial Sequence
  Synthetic construct
DIGSKS

SEQ ID NO: 24061 - protein, 6 aa, Artificial Sequence
  Synthetic construct
ALPKKY

SEQ ID NO: 24062 - protein, 9 aa, Artificial Sequence
  Synthetic construct
GSNIGVGYD

SEQ ID NO: 24063 - protein, 7 aa, Artificial Sequence
  Synthetic construct
QSVTSSY

SEQ ID NO: 24064 - protein, 6 aa, Artificial Sequence
  Synthetic construct
QSISSY

SEQ ID NO: 24065 - protein, 9 aa, Artificial Sequence
  Synthetic construct
SSHIGAGYG

SEQ ID NO: 24066 - protein, 8 aa, Artificial Sequence
  Synthetic construct
SSNVGSNA

SEQ ID NO: 24067 - protein, 7 aa, Artificial Sequence
  Synthetic construct
QSVSSSQ

SEQ ID NO: 24068 - protein, 6 aa, Artificial Sequence
  Synthetic construct
QSIGSS

SEQ ID NO: 24069 - protein, 12 aa, Artificial Sequence
  Synthetic construct
QSVLSSSNNKNY

SEQ ID NO: 24070 - protein, 9 aa, Artificial Sequence
  Synthetic construct
SGINVGTYR

SEQ ID NO: 24071 - protein, 6 aa, Artificial Sequence
  Synthetic construct
QSVSSN

SEQ ID NO: 24072 - protein, 9 aa, Artificial Sequence
  Synthetic construct
SSNIGAGYD

SEQ ID NO: 24073 - protein, 8 aa, Artificial Sequence
  Synthetic construct
SSNIGNHY

SEQ ID NO: 24074 - protein, 6 aa, Artificial Sequence
  Synthetic construct
SLRSYY

SEQ ID NO: 24075 - protein, 7 aa, Artificial Sequence
  Synthetic construct
QSVSSSS

SEQ ID NO: 24076 - protein, 6 aa, Artificial Sequence
  Synthetic construct
QSVSNY

SEQ ID NO: 24077 - protein, 6 aa, Artificial Sequence
  Synthetic construct
QSLGSN

SEQ ID NO: 24078 - protein, 9 aa, Artificial Sequence
  Synthetic construct
SSDVGSYNL

SEQ ID NO: 24079 - protein, 8 aa, Artificial Sequence
  Synthetic construct
SSNIGSSI

SEQ ID NO: 24080 - protein, 11 aa, Artificial Sequence
  Synthetic construct
QSLLHSNGYNY

SEQ ID NO: 24081 - protein, 9 aa, Artificial Sequence
  Synthetic construct
SGINVGTYR

SEQ ID NO: 24082 - protein, 6 aa, Artificial Sequence
  Synthetic construct
QSISSW

SEQ ID NO: 24083 - protein, 8 aa, Artificial Sequence
  Synthetic construct
SSNIGNNY

SEQ ID NO: 24084 - protein, 9 aa, Artificial Sequence
  Synthetic construct
SSDVGGYNY

SEQ ID NO: 24085 - protein, 6 aa, Artificial Sequence
  Synthetic construct
ALPKQY

SEQ ID NO: 24086 - protein, 12 aa, Artificial Sequence
  Synthetic construct
QSVLDSSNNKNY

SEQ ID NO: 24087 - protein, 7 aa, Artificial Sequence
  Synthetic construct
QGVSSNY

SEQ ID NO: 24088 - protein, 9 aa, Artificial Sequence
  Synthetic construct
SSDVGSNGL

SEQ ID NO: 24089 - protein, 7 aa, Artificial Sequence
  Synthetic construct
QSVGSSY

SEQ ID NO: 24090 - protein, 9 aa, Artificial Sequence
  Synthetic construct
SSDIGSYNL

SEQ ID NO: 24091 - protein, 7 aa, Artificial Sequence
  Synthetic construct
QSVGSIY

SEQ ID NO: 24092 - protein, 8 aa, Artificial Sequence
  Synthetic construct
SSNIGSNY

SEQ ID NO: 24093 - protein, 6 aa, Artificial Sequence
  Synthetic construct
QGISRW

SEQ ID NO: 24094 - protein, 6 aa, Artificial Sequence
  Synthetic construct
QSISSR

SEQ ID NO: 24095 - protein, 6 aa, Artificial Sequence
  Synthetic construct
QSIANS

SEQ ID NO: 24096 - protein, 6 aa, Artificial Sequence
  Synthetic construct
NIGSKN

SEQ ID NO: 24097 - protein, 6 aa, Artificial Sequence
  Synthetic construct
QSVSSN

SEQ ID NO: 24098 - protein, 6 aa, Artificial Sequence
  Synthetic construct
QGISSY

SEQ ID NO: 24099 - protein, 12 aa, Artificial Sequence
  Synthetic construct
QSVLYSSNNKNF

SEQ ID NO: 24100 - protein, 6 aa, Artificial Sequence
  Synthetic construct
ALPKQY

SEQ ID NO: 24101 - protein, 6 aa, Artificial Sequence
  Synthetic construct
ALPNQY

SEQ ID NO: 24102 - protein, 9 aa, Artificial Sequence
  Synthetic construct
SSDVGSYDH

SEQ ID NO: 24103 - protein, 6 aa, Artificial Sequence
  Synthetic construct
QSVSSY

SEQ ID NO: 24104 - protein, 7 aa, Artificial Sequence
  Synthetic construct
QSVSSTY

SEQ ID NO: 24105 - protein, 7 aa, Artificial Sequence
  Synthetic construct
QSIHNNY

SEQ ID NO: 24106 - protein, 11 aa, Artificial Sequence
  Synthetic construct
QSLLHSNGYNY

SEQ ID NO: 24107 - protein, 6 aa, Artificial Sequence
  Synthetic construct
ALPKQY

SEQ ID NO: 24108 - protein, 8 aa, Artificial Sequence
  Synthetic construct
SSNIGNNY

SEQ ID NO: 24109 - protein, 6 aa, Artificial Sequence
  Synthetic construct
QSISSY

SEQ ID NO: 24110 - protein, 11 aa, Artificial Sequence
  Synthetic construct
QSLLYSNGYTY

SEQ ID NO: 24111 - protein, 6 aa, Artificial Sequence
  Synthetic construct
QSISTY

SEQ ID NO: 24112 - protein, 6 aa, Artificial Sequence
  Synthetic construct
QDITIY

SEQ ID NO: 24113 - protein, 6 aa, Artificial Sequence
  Synthetic construct
QSVGSY

SEQ ID NO: 24114 - protein, 8 aa, Artificial Sequence
  Synthetic construct
SSNIGNNY

SEQ ID NO: 24115 - protein, 6 aa, Artificial Sequence
  Synthetic construct
KLGDKF

SEQ ID NO: 24116 - protein, 11 aa, Artificial Sequence
  Synthetic construct
QSLLHSDGKTY

SEQ ID NO: 24117 - protein, 9 aa, Artificial Sequence
  Synthetic construct
SHDVGGYNY

SEQ ID NO: 24118 - protein, 6 aa, Artificial Sequence
  Synthetic construct
QSINRS

SEQ ID NO: 24119 - protein, 11 aa, Artificial Sequence
  Synthetic construct
QSLLHSNGYNY

SEQ ID NO: 24120 - protein, 6 aa, Artificial Sequence
  Synthetic construct
QGIRND

SEQ ID NO: 24121 - protein, 6 aa, Artificial Sequence
  Synthetic construct
QDITKY

SEQ ID NO: 24122 - protein, 9 aa, Artificial Sequence
  Synthetic construct
SADVGAYNY

SEQ ID NO: 24123 - protein, 6 aa, Artificial Sequence
  Synthetic construct
NFGSKS

SEQ ID NO: 24124 - protein, 6 aa, Artificial Sequence
  Synthetic construct
QGISTW

SEQ ID NO: 24125 - protein, 11 aa, Artificial Sequence
  Synthetic construct
QSLLYSNGYTY

SEQ ID NO: 24126 - protein, 6 aa, Artificial Sequence
  Synthetic construct
QDISIY

SEQ ID NO: 24127 - protein, 9 aa, Artificial Sequence
  Synthetic construct
SSDVGGYNY

SEQ ID NO: 24128 - protein, 6 aa, Artificial Sequence
  Synthetic construct
QSVSNF

SEQ ID NO: 24129 - protein, 6 aa, Artificial Sequence
  Synthetic construct
QDINIY

SEQ ID NO: 24130 - protein, 9 aa, Artificial Sequence
  Synthetic construct
SSDIGGYKY

SEQ ID NO: 24131 - protein, 9 aa, Artificial Sequence
  Synthetic construct
TSNIGALYD

SEQ ID NO: 24132 - protein, 7 aa, Artificial Sequence
  Synthetic construct
QSVSSSY

SEQ ID NO: 24133 - protein, 9 aa, Artificial Sequence
  Synthetic construct
SSDIATYNY

SEQ ID NO: 24134 - protein, 6 aa, Artificial Sequence
  Synthetic construct
KLGDKY

SEQ ID NO: 24135 - protein, 6 aa, Artificial Sequence
  Synthetic construct
QDINNY

SEQ ID NO: 24136 - protein, 6 aa, Artificial Sequence
  Synthetic construct
QNISSD

SEQ ID NO: 24137 - protein, 9 aa, Artificial Sequence
  Synthetic construct
SSDVGGYNY

SEQ ID NO: 24138 - protein, 6 aa, Artificial Sequence
  Synthetic construct
QSVSSY

SEQ ID NO: 24139 - protein, 6 aa, Artificial Sequence
  Synthetic construct
QSISSY

SEQ ID NO: 24140 - protein, 8 aa, Artificial Sequence
  Synthetic construct
SSNIGSSI

SEQ ID NO: 24141 - protein, 6 aa, Artificial Sequence
  Synthetic construct
QGIRND

SEQ ID NO: 24142 - protein, 6 aa, Artificial Sequence
  Synthetic construct
QGISIY

SEQ ID NO: 24143 - protein, 6 aa, Artificial Sequence
  Synthetic construct
QGISSY

SEQ ID NO: 24144 - protein, 6 aa, Artificial Sequence
  Synthetic construct
ALPKKY

SEQ ID NO: 24145 - protein, 11 aa, Artificial Sequence
  Synthetic construct
QSLLHSDGKTY

SEQ ID NO: 24146 - protein, 6 aa, Artificial Sequence
  Synthetic construct
QTVSSN

SEQ ID NO: 24147 - protein, 7 aa, Artificial Sequence
  Synthetic construct
QSVSTSY

SEQ ID NO: 24148 - protein, 6 aa, Artificial Sequence
  Synthetic construct
ALPKKY

SEQ ID NO: 24149 - protein, 6 aa, Artificial Sequence
  Synthetic construct
QSISSF

SEQ ID NO: 24150 - protein, 8 aa, Artificial Sequence
  Synthetic construct
SSNIGSNT

SEQ ID NO: 24151 - protein, 7 aa, Artificial Sequence
  Synthetic construct
QSVSSSY

SEQ ID NO: 24152 - protein, 6 aa, Artificial Sequence
  Synthetic construct
NNGSKS

SEQ ID NO: 24153 - protein, 6 aa, Artificial Sequence
  Synthetic construct
SLRRYY

SEQ ID NO: 24154 - protein, 6 aa, Artificial Sequence
  Synthetic construct
QSVSSN

SEQ ID NO: 24155 - protein, 6 aa, Artificial Sequence
  Synthetic construct
QSISSW

SEQ ID NO: 24156 - protein, 6 aa, Artificial Sequence
  Synthetic construct
ALPKKY

SEQ ID NO: 24157 - protein, 6 aa, Artificial Sequence
  Synthetic construct
QSISTY

SEQ ID NO: 24158 - protein, 6 aa, Artificial Sequence
  Synthetic construct
QSVSSF

SEQ ID NO: 24159 - protein, 7 aa, Artificial Sequence
  Synthetic construct
QSVSSSY

SEQ ID NO: 24160 - protein, 6 aa, Artificial Sequence
  Synthetic construct
QSIGSR

SEQ ID NO: 24161 - protein, 6 aa, Artificial Sequence
  Synthetic construct
ALPKKY

SEQ ID NO: 24162 - protein, 11 aa, Artificial Sequence
  Synthetic construct
QSLLHSDGKTY

SEQ ID NO: 24163 - protein, 6 aa, Artificial Sequence
  Synthetic construct
ELPKKY

SEQ ID NO: 24164 - protein, 12 aa, Artificial Sequence
  Synthetic construct
QSVLYSSNNKNH

SEQ ID NO: 24165 - protein, 11 aa, Artificial Sequence
  Synthetic construct
QSLLHSNGKHY

SEQ ID NO: 24166 - protein, 6 aa, Artificial Sequence
  Synthetic construct
QSVSSF

SEQ ID NO: 24167 - protein, 9 aa, Artificial Sequence
  Synthetic construct
SSDVGSYNL

SEQ ID NO: 24168 - protein, 6 aa, Artificial Sequence
  Synthetic construct
QSIGSS

SEQ ID NO: 24169 - protein, 9 aa, Artificial Sequence
  Synthetic construct
SSDVGGYNY

SEQ ID NO: 24170 - protein, 6 aa, Artificial Sequence
  Synthetic construct
NIGSNS

SEQ ID NO: 24171 - protein, 6 aa, Artificial Sequence
  Synthetic construct
DIGSKN

SEQ ID NO: 24172 - protein, 6 aa, Artificial Sequence
  Synthetic construct
QDISIY

SEQ ID NO: 24173 - protein, 6 aa, Artificial Sequence
  Synthetic construct
NIGSKN

SEQ ID NO: 24174 - protein, 6 aa, Artificial Sequence
  Synthetic construct
QDIRND

SEQ ID NO: 24175 - protein, 6 aa, Artificial Sequence
  Synthetic construct
NIGSKS

SEQ ID NO: 24176 - protein, 6 aa, Artificial Sequence
  Synthetic construct
QSISSW

SEQ ID NO: 24177 - protein, 6 aa, Artificial Sequence
  Synthetic construct
ALPKEY

SEQ ID NO: 24178 - protein, 9 aa, Artificial Sequence
  Synthetic construct
SSDIGRYNL

SEQ ID NO: 24179 - protein, 6 aa, Artificial Sequence
  Synthetic construct
QDINNY

SEQ ID NO: 24180 - protein, 6 aa, Artificial Sequence
  Synthetic construct
QSVSNF

SEQ ID NO: 24181 - protein, 6 aa, Artificial Sequence
  Synthetic construct
ALPKKY

SEQ ID NO: 24182 - protein, 6 aa, Artificial Sequence
  Synthetic construct
QSINKY

SEQ ID NO: 24183 - protein, 8 aa, Artificial Sequence
  Synthetic construct
SSNIGSNY

SEQ ID NO: 24184 - protein, 6 aa, Artificial Sequence
  Synthetic construct
QNINTY

SEQ ID NO: 24185 - protein, 7 aa, Artificial Sequence
  Synthetic construct
QRVTSTS

SEQ ID NO: 24186 - protein, 6 aa, Artificial Sequence
  Synthetic construct
ALSKKY

SEQ ID NO: 24187 - protein, 6 aa, Artificial Sequence
  Synthetic construct
QTINIY

SEQ ID NO: 24188 - protein, 9 aa, Artificial Sequence
  Synthetic construct
SSDVGGYNY

SEQ ID NO: 24189 - protein, 11 aa, Artificial Sequence
  Synthetic construct
QSLLHGDGKTY

SEQ ID NO: 24190 - protein, 6 aa, Artificial Sequence
  Synthetic construct
QDINKY

SEQ ID NO: 24191 - protein, 12 aa, Artificial Sequence
  Synthetic construct
QSVLYSSNNKNY

SEQ ID NO: 24192 - protein, 11 aa, Artificial Sequence
  Synthetic construct
QSLVHRNGYNY

SEQ ID NO: 24193 - protein, 6 aa, Artificial Sequence
  Synthetic construct
QDISSF

SEQ ID NO: 24194 - protein, 9 aa, Artificial Sequence
  Synthetic construct
SSDVGGYNY

SEQ ID NO: 24195 - protein, 9 aa, Artificial Sequence
  Synthetic construct
SSNIGAGYD

SEQ ID NO: 24196 - protein, 12 aa, Artificial Sequence
  Synthetic construct
QSVLYSSSNKNY

SEQ ID NO: 24197 - protein, 6 aa, Artificial Sequence
  Synthetic construct
QSISSW

SEQ ID NO: 24198 - protein, 8 aa, Artificial Sequence
  Synthetic construct
SSNIGSNH

SEQ ID NO: 24199 - protein, 9 aa, Artificial Sequence
  Synthetic construct
ISDIGSYDH

SEQ ID NO: 24200 - protein, 6 aa, Artificial Sequence
  Synthetic construct
QGISSW

SEQ ID NO: 24201 - protein, 9 aa, Artificial Sequence
  Synthetic construct
SSDLGGYNF

SEQ ID NO: 24202 - protein, 6 aa, Artificial Sequence
  Synthetic construct
QGIRND

SEQ ID NO: 24203 - protein, 7 aa, Artificial Sequence
  Synthetic construct
QSVSSSY

SEQ ID NO: 24204 - protein, 6 aa, Artificial Sequence
  Synthetic construct
QSVSSY

SEQ ID NO: 24205 - protein, 6 aa, Artificial Sequence
  Synthetic construct
ALPKKY

SEQ ID NO: 24206 - protein, 8 aa, Artificial Sequence
  Synthetic construct
SSDIGDIY

SEQ ID NO: 24207 - protein, 9 aa, Artificial Sequence
  Synthetic construct
TGAVTSGYF

SEQ ID NO: 24208 - protein, 6 aa, Artificial Sequence
  Synthetic construct
NIGDKS

SEQ ID NO: 24209 - protein, 9 aa, Artificial Sequence
  Synthetic construct
SSDVGDSDY

SEQ ID NO: 24210 - protein, 6 aa, Artificial Sequence
  Synthetic construct
QSVSSN

SEQ ID NO: 24211 - protein, 6 aa, Artificial Sequence
  Synthetic construct
QSSGNY

SEQ ID NO: 24212 - protein, 11 aa, Artificial Sequence
  Synthetic construct
QSLLHRNGYNY

SEQ ID NO: 24213 - protein, 9 aa, Artificial Sequence
  Synthetic construct
NNDVGSYNL

SEQ ID NO: 24214 - protein, 12 aa, Artificial Sequence
  Synthetic construct
QSVLYSSNNKNY

SEQ ID NO: 24215 - protein, 6 aa, Artificial Sequence
  Synthetic construct
QSLSNN

SEQ ID NO: 24216 - protein, 8 aa, Artificial Sequence
  Synthetic construct
SSNIGSNH

SEQ ID NO: 24217 - protein, 9 aa, Artificial Sequence
  Synthetic construct
SSNIGAGYD

SEQ ID NO: 24218 - protein, 6 aa, Artificial Sequence
  Synthetic construct
QDINIY

SEQ ID NO: 24219 - protein, 6 aa, Artificial Sequence
  Synthetic construct
QNISSY

SEQ ID NO: 24220 - protein, 8 aa, Artificial Sequence
  Synthetic construct
SSNIRYNA

SEQ ID NO: 24221 - protein, 6 aa, Artificial Sequence
  Synthetic construct
ALPNQY

SEQ ID NO: 24222 - protein, 6 aa, Artificial Sequence
  Synthetic construct
HSVSTY

SEQ ID NO: 24223 - protein, 9 aa, Artificial Sequence
  Synthetic construct
SGLYVDTYT

SEQ ID NO: 24224 - protein, 6 aa, Artificial Sequence
  Synthetic construct
HSVSTR

SEQ ID NO: 24225 - protein, 6 aa, Artificial Sequence
  Synthetic construct
QSIGSS

SEQ ID NO: 24226 - protein, 11 aa, Artificial Sequence
  Synthetic construct
QSLLHSDGKTY

SEQ ID NO: 24227 - protein, 3 aa, Artificial Sequence
  Synthetic construct
KDT

SEQ ID NO: 24228 - protein, 3 aa, Artificial Sequence
  Synthetic construct
GAS

SEQ ID NO: 24229 - protein, 3 aa, Artificial Sequence
  Synthetic construct
QDT

SEQ ID NO: 24230 - protein, 3 aa, Artificial Sequence
  Synthetic construct
EGS

SEQ ID NO: 24231 - protein, 3 aa, Artificial Sequence
  Synthetic construct
EDS

SEQ ID NO: 24232 - protein, 3 aa, Artificial Sequence
  Synthetic construct
DAS

SEQ ID NO: 24233 - protein, 3 aa, Artificial Sequence
  Synthetic construct
DND

SEQ ID NO: 24234 - protein, 3 aa, Artificial Sequence
  Synthetic construct
EVS

SEQ ID NO: 24235 - protein, 3 aa, Artificial Sequence
  Synthetic construct
EVS

SEQ ID NO: 24236 - protein, 3 aa, Artificial Sequence
  Synthetic construct
YDS

SEQ ID NO: 24237 - protein, 3 aa, Artificial Sequence
  Synthetic construct
EVS

SEQ ID NO: 24238 - protein, 3 aa, Artificial Sequence
  Synthetic construct
DAS

SEQ ID NO: 24239 - protein, 3 aa, Artificial Sequence
  Synthetic construct
KAS

SEQ ID NO: 24240 - protein, 3 aa, Artificial Sequence
  Synthetic construct
AAS

SEQ ID NO: 24241 - protein, 3 aa, Artificial Sequence
  Synthetic construct
DAS

SEQ ID NO: 24242 - protein, 3 aa, Artificial Sequence
  Synthetic construct
DAS

SEQ ID NO: 24243 - protein, 3 aa, Artificial Sequence
  Synthetic construct
EDS

SEQ ID NO: 24244 - protein, 3 aa, Artificial Sequence
  Synthetic construct
AAS

SEQ ID NO: 24245 - protein, 3 aa, Artificial Sequence
  Synthetic construct
DVS

SEQ ID NO: 24246 - protein, 3 aa, Artificial Sequence
  Synthetic construct
EGT

SEQ ID NO: 24247 - protein, 3 aa, Artificial Sequence
  Synthetic construct
WAS

SEQ ID NO: 24248 - protein, 3 aa, Artificial Sequence
  Synthetic construct
EDS

SEQ ID NO: 24249 - protein, 3 aa, Artificial Sequence
  Synthetic construct
TAS

SEQ ID NO: 24250 - protein, 3 aa, Artificial Sequence
  Synthetic construct
GAS

SEQ ID NO: 24251 - protein, 3 aa, Artificial Sequence
  Synthetic construct
RNN

SEQ ID NO: 24252 - protein, 3 aa, Artificial Sequence
  Synthetic construct
STS

SEQ ID NO: 24253 - protein, 3 aa, Artificial Sequence
  Synthetic construct
GNS

SEQ ID NO: 24254 - protein, 3 aa, Artificial Sequence
  Synthetic construct
HVS

SEQ ID NO: 24255 - protein, 3 aa, Artificial Sequence
  Synthetic construct
GAS

SEQ ID NO: 24256 - protein, 3 aa, Artificial Sequence
  Synthetic construct
AAF

SEQ ID NO: 24257 - protein, 3 aa, Artificial Sequence
  Synthetic construct
DVS

SEQ ID NO: 24258 - protein, 3 aa, Artificial Sequence
  Synthetic construct
AAS

SEQ ID NO: 24259 - protein, 3 aa, Artificial Sequence
  Synthetic construct
DNN

SEQ ID NO: 24260 - protein, 3 aa, Artificial Sequence
  Synthetic construct
KAS

SEQ ID NO: 24261 - protein, 3 aa, Artificial Sequence
  Synthetic construct
SNN

SEQ ID NO: 24262 - protein, 3 aa, Artificial Sequence
  Synthetic construct
SAS

SEQ ID NO: 24263 - protein, 3 aa, Artificial Sequence
  Synthetic construct
GAS

SEQ ID NO: 24264 - protein, 3 aa, Artificial Sequence
  Synthetic construct
EDS

SEQ ID NO: 24265 - protein, 3 aa, Artificial Sequence
  Synthetic construct
SND

SEQ ID NO: 24266 - protein, 3 aa, Artificial Sequence
  Synthetic construct
EDN

SEQ ID NO: 24267 - protein, 3 aa, Artificial Sequence
  Synthetic construct
PAS

SEQ ID NO: 24268 - protein, 3 aa, Artificial Sequence
  Synthetic construct
KAS

SEQ ID NO: 24269 - protein, 3 aa, Artificial Sequence
  Synthetic construct
AAS

SEQ ID NO: 24270 - protein, 3 aa, Artificial Sequence
  Synthetic construct
EAS

SEQ ID NO: 24271 - protein, 3 aa, Artificial Sequence
  Synthetic construct
DVN

SEQ ID NO: 24272 - protein, 3 aa, Artificial Sequence
  Synthetic construct
EGT

SEQ ID NO: 24273 - protein, 3 aa, Artificial Sequence
  Synthetic construct
GAS

SEQ ID NO: 24274 - protein, 3 aa, Artificial Sequence
  Synthetic construct
DAS

SEQ ID NO: 24275 - protein, 3 aa, Artificial Sequence
  Synthetic construct
DNN

SEQ ID NO: 24276 - protein, 3 aa, Artificial Sequence
  Synthetic construct
LGS

SEQ ID NO: 24277 - protein, 3 aa, Artificial Sequence
  Synthetic construct
GAS

SEQ ID NO: 24278 - protein, 3 aa, Artificial Sequence
  Synthetic construct
EVS

SEQ ID NO: 24279 - protein, 3 aa, Artificial Sequence
  Synthetic construct
EVS

SEQ ID NO: 24280 - protein, 3 aa, Artificial Sequence
  Synthetic construct
KDT

SEQ ID NO: 24281 - protein, 3 aa, Artificial Sequence
  Synthetic construct
KDS

SEQ ID NO: 24282 - protein, 3 aa, Artificial Sequence
  Synthetic construct
DVS

SEQ ID NO: 24283 - protein, 3 aa, Artificial Sequence
  Synthetic construct
EGN

SEQ ID NO: 24284 - protein, 3 aa, Artificial Sequence
  Synthetic construct
GNS

SEQ ID NO: 24285 - protein, 3 aa, Artificial Sequence
  Synthetic construct
ELS

SEQ ID NO: 24286 - protein, 3 aa, Artificial Sequence
  Synthetic construct
DTN

SEQ ID NO: 24287 - protein, 3 aa, Artificial Sequence
  Synthetic construct
EGT

SEQ ID NO: 24288 - protein, 3 aa, Artificial Sequence
  Synthetic construct
GNN

SEQ ID NO: 24289 - protein, 3 aa, Artificial Sequence
  Synthetic construct
KDS

SEQ ID NO: 24290 - protein, 3 aa, Artificial Sequence
  Synthetic construct
LGS

SEQ ID NO: 24291 - protein, 3 aa, Artificial Sequence
  Synthetic construct
DAS

SEQ ID NO: 24292 - protein, 3 aa, Artificial Sequence
  Synthetic construct
EDN

SEQ ID NO: 24293 - protein, 3 aa, Artificial Sequence
  Synthetic construct
GAS

SEQ ID NO: 24294 - protein, 3 aa, Artificial Sequence
  Synthetic construct
DAS

SEQ ID NO: 24295 - protein, 3 aa, Artificial Sequence
  Synthetic construct
TAS

SEQ ID NO: 24296 - protein, 3 aa, Artificial Sequence
  Synthetic construct
GAS

SEQ ID NO: 24297 - protein, 3 aa, Artificial Sequence
  Synthetic construct
GAS

SEQ ID NO: 24298 - protein, 3 aa, Artificial Sequence
  Synthetic construct
WAS

SEQ ID NO: 24299 - protein, 3 aa, Artificial Sequence
  Synthetic construct
GAS

SEQ ID NO: 24300 - protein, 3 aa, Artificial Sequence
  Synthetic construct
RDS

SEQ ID NO: 24301 - protein, 3 aa, Artificial Sequence
  Synthetic construct
EVS

SEQ ID NO: 24302 - protein, 3 aa, Artificial Sequence
  Synthetic construct
RNN

SEQ ID NO: 24303 - protein, 3 aa, Artificial Sequence
  Synthetic construct
WAS

SEQ ID NO: 24304 - protein, 3 aa, Artificial Sequence
  Synthetic construct
DAS

SEQ ID NO: 24305 - protein, 3 aa, Artificial Sequence
  Synthetic construct
DVS

SEQ ID NO: 24306 - protein, 3 aa, Artificial Sequence
  Synthetic construct
GAS

SEQ ID NO: 24307 - protein, 3 aa, Artificial Sequence
  Synthetic construct
AAS

SEQ ID NO: 24308 - protein, 3 aa, Artificial Sequence
  Synthetic construct
DAS

SEQ ID NO: 24309 - protein, 3 aa, Artificial Sequence
  Synthetic construct
EDS

SEQ ID NO: 24310 - protein, 3 aa, Artificial Sequence
  Synthetic construct
EVT

SEQ ID NO: 24311 - protein, 3 aa, Artificial Sequence
  Synthetic construct
DVT

SEQ ID NO: 24312 - protein, 3 aa, Artificial Sequence
  Synthetic construct
AAS

SEQ ID NO: 24313 - protein, 3 aa, Artificial Sequence
  Synthetic construct
GAS

SEQ ID NO: 24314 - protein, 7 aa, Artificial Sequence
  Synthetic construct
VNSDGSH

SEQ ID NO: 24315 - protein, 3 aa, Artificial Sequence
  Synthetic construct
DVS

SEQ ID NO: 24316 - protein, 3 aa, Artificial Sequence
  Synthetic construct
EDT

SEQ ID NO: 24317 - protein, 3 aa, Artificial Sequence
  Synthetic construct
DVS

SEQ ID NO: 24318 - protein, 3 aa, Artificial Sequence
  Synthetic construct
ENN

SEQ ID NO: 24319 - protein, 3 aa, Artificial Sequence
  Synthetic construct
GAS

SEQ ID NO: 24320 - protein, 3 aa, Artificial Sequence
  Synthetic construct
DAS

SEQ ID NO: 24321 - protein, 3 aa, Artificial Sequence
  Synthetic construct
AAS

SEQ ID NO: 24322 - protein, 3 aa, Artificial Sequence
  Synthetic construct
GAS

SEQ ID NO: 24323 - protein, 3 aa, Artificial Sequence
  Synthetic construct
EDN

SEQ ID NO: 24324 - protein, 3 aa, Artificial Sequence
  Synthetic construct
DAS

SEQ ID NO: 24325 - protein, 3 aa, Artificial Sequence
  Synthetic construct
ENT

SEQ ID NO: 24326 - protein, 3 aa, Artificial Sequence
  Synthetic construct
ATS

SEQ ID NO: 24327 - protein, 3 aa, Artificial Sequence
  Synthetic construct
YDS

SEQ ID NO: 24328 - protein, 3 aa, Artificial Sequence
  Synthetic construct
ELS

SEQ ID NO: 24329 - protein, 3 aa, Artificial Sequence
  Synthetic construct
WAS

SEQ ID NO: 24330 - protein, 3 aa, Artificial Sequence
  Synthetic construct
RNN

SEQ ID NO: 24331 - protein, 3 aa, Artificial Sequence
  Synthetic construct
DNN

SEQ ID NO: 24332 - protein, 3 aa, Artificial Sequence
  Synthetic construct
AAS

SEQ ID NO: 24333 - protein, 3 aa, Artificial Sequence
  Synthetic construct
EGS

SEQ ID NO: 24334 - protein, 3 aa, Artificial Sequence
  Synthetic construct
GAS

SEQ ID NO: 24335 - protein, 3 aa, Artificial Sequence
  Synthetic construct
KAS

SEQ ID NO: 24336 - protein, 3 aa, Artificial Sequence
  Synthetic construct
GAS

SEQ ID NO: 24337 - protein, 3 aa, Artificial Sequence
  Synthetic construct
DAS

SEQ ID NO: 24338 - protein, 3 aa, Artificial Sequence
  Synthetic construct
SAS

SEQ ID NO: 24339 - protein, 3 aa, Artificial Sequence
  Synthetic construct
ENN

SEQ ID NO: 24340 - protein, 3 aa, Artificial Sequence
  Synthetic construct
GAS

SEQ ID NO: 24341 - protein, 3 aa, Artificial Sequence
  Synthetic construct
WAS

SEQ ID NO: 24342 - protein, 3 aa, Artificial Sequence
  Synthetic construct
GTS

SEQ ID NO: 24343 - protein, 3 aa, Artificial Sequence
  Synthetic construct
RDN

SEQ ID NO: 24344 - protein, 3 aa, Artificial Sequence
  Synthetic construct
DSS

SEQ ID NO: 24345 - protein, 3 aa, Artificial Sequence
  Synthetic construct
WAF

SEQ ID NO: 24346 - protein, 3 aa, Artificial Sequence
  Synthetic construct
WAS

SEQ ID NO: 24347 - protein, 3 aa, Artificial Sequence
  Synthetic construct
VVD

SEQ ID NO: 24348 - protein, 3 aa, Artificial Sequence
  Synthetic construct
RDY

SEQ ID NO: 24349 - protein, 3 aa, Artificial Sequence
  Synthetic construct
GAS

SEQ ID NO: 24350 - protein, 3 aa, Artificial Sequence
  Synthetic construct
DVS

SEQ ID NO: 24351 - protein, 3 aa, Artificial Sequence
  Synthetic construct
EGS

SEQ ID NO: 24352 - protein, 3 aa, Artificial Sequence
  Synthetic construct
AAS

SEQ ID NO: 24353 - protein, 3 aa, Artificial Sequence
  Synthetic construct
DAS

SEQ ID NO: 24354 - protein, 3 aa, Artificial Sequence
  Synthetic construct
EDN

SEQ ID NO: 24355 - protein, 3 aa, Artificial Sequence
  Synthetic construct
EVS

SEQ ID NO: 24356 - protein, 3 aa, Artificial Sequence
  Synthetic construct
AAS

SEQ ID NO: 24357 - protein, 3 aa, Artificial Sequence
  Synthetic construct
GAS

SEQ ID NO: 24358 - protein, 3 aa, Artificial Sequence
  Synthetic construct
DAS

SEQ ID NO: 24359 - protein, 3 aa, Artificial Sequence
  Synthetic construct
RNN

SEQ ID NO: 24360 - protein, 3 aa, Artificial Sequence
  Synthetic construct
DAS

SEQ ID NO: 24361 - protein, 3 aa, Artificial Sequence
  Synthetic construct
AAS

SEQ ID NO: 24362 - protein, 3 aa, Artificial Sequence
  Synthetic construct
DVT

SEQ ID NO: 24363 - protein, 3 aa, Artificial Sequence
  Synthetic construct
EDS

SEQ ID NO: 24364 - protein, 3 aa, Artificial Sequence
  Synthetic construct
SND

SEQ ID NO: 24365 - protein, 3 aa, Artificial Sequence
  Synthetic construct
GAS

SEQ ID NO: 24366 - protein, 3 aa, Artificial Sequence
  Synthetic construct
EVS

SEQ ID NO: 24367 - protein, 3 aa, Artificial Sequence
  Synthetic construct
GNS

SEQ ID NO: 24368 - protein, 3 aa, Artificial Sequence
  Synthetic construct
EDT

SEQ ID NO: 24369 - protein, 3 aa, Artificial Sequence
  Synthetic construct
TAS

SEQ ID NO: 24370 - protein, 3 aa, Artificial Sequence
  Synthetic construct
EDT

SEQ ID NO: 24371 - protein, 3 aa, Artificial Sequence
  Synthetic construct
EVS

SEQ ID NO: 24372 - protein, 3 aa, Artificial Sequence
  Synthetic construct
EDS

SEQ ID NO: 24373 - protein, 3 aa, Artificial Sequence
  Synthetic construct
GAS

SEQ ID NO: 24374 - protein, 3 aa, Artificial Sequence
  Synthetic construct
AAS

SEQ ID NO: 24375 - protein, 3 aa, Artificial Sequence
  Synthetic construct
GAS

SEQ ID NO: 24376 - protein, 3 aa, Artificial Sequence
  Synthetic construct
WAS

SEQ ID NO: 24377 - protein, 3 aa, Artificial Sequence
  Synthetic construct
EDT

SEQ ID NO: 24378 - protein, 3 aa, Artificial Sequence
  Synthetic construct
GAS

SEQ ID NO: 24379 - protein, 3 aa, Artificial Sequence
  Synthetic construct
ENN

SEQ ID NO: 24380 - protein, 3 aa, Artificial Sequence
  Synthetic construct
AAS

SEQ ID NO: 24381 - protein, 3 aa, Artificial Sequence
  Synthetic construct
GAS

SEQ ID NO: 24382 - protein, 3 aa, Artificial Sequence
  Synthetic construct
AAS

SEQ ID NO: 24383 - protein, 3 aa, Artificial Sequence
  Synthetic construct
AAS

SEQ ID NO: 24384 - protein, 3 aa, Artificial Sequence
  Synthetic construct
EDS

SEQ ID NO: 24385 - protein, 3 aa, Artificial Sequence
  Synthetic construct
DVN

SEQ ID NO: 24386 - protein, 3 aa, Artificial Sequence
  Synthetic construct
YAS

SEQ ID NO: 24387 - protein, 3 aa, Artificial Sequence
  Synthetic construct
GAS

SEQ ID NO: 24388 - protein, 3 aa, Artificial Sequence
  Synthetic construct
GNT

SEQ ID NO: 24389 - protein, 3 aa, Artificial Sequence
  Synthetic construct
GNS

SEQ ID NO: 24390 - protein, 3 aa, Artificial Sequence
  Synthetic construct
QDT

SEQ ID NO: 24391 - protein, 3 aa, Artificial Sequence
  Synthetic construct
GTS

SEQ ID NO: 24392 - protein, 3 aa, Artificial Sequence
  Synthetic construct
WAS

SEQ ID NO: 24393 - protein, 3 aa, Artificial Sequence
  Synthetic construct
DVN

SEQ ID NO: 24394 - protein, 3 aa, Artificial Sequence
  Synthetic construct
KAS

SEQ ID NO: 24395 - protein, 3 aa, Artificial Sequence
  Synthetic construct
QDN

SEQ ID NO: 24396 - protein, 3 aa, Artificial Sequence
  Synthetic construct
GTN

SEQ ID NO: 24397 - protein, 3 aa, Artificial Sequence
  Synthetic construct
QDS

SEQ ID NO: 24398 - protein, 3 aa, Artificial Sequence
  Synthetic construct
GAS

SEQ ID NO: 24399 - protein, 3 aa, Artificial Sequence
  Synthetic construct
DAS

SEQ ID NO: 24400 - protein, 3 aa, Artificial Sequence
  Synthetic construct
STT

SEQ ID NO: 24401 - protein, 3 aa, Artificial Sequence
  Synthetic construct
DAS

SEQ ID NO: 24402 - protein, 3 aa, Artificial Sequence
  Synthetic construct
LGS

SEQ ID NO: 24403 - protein, 3 aa, Artificial Sequence
  Synthetic construct
ENN

SEQ ID NO: 24404 - protein, 3 aa, Artificial Sequence
  Synthetic construct
GAS

SEQ ID NO: 24405 - protein, 3 aa, Artificial Sequence
  Synthetic construct
GKN

SEQ ID NO: 24406 - protein, 3 aa, Artificial Sequence
  Synthetic construct
GGS

SEQ ID NO: 24407 - protein, 3 aa, Artificial Sequence
  Synthetic construct
DVT

SEQ ID NO: 24408 - protein, 3 aa, Artificial Sequence
  Synthetic construct
GAS

SEQ ID NO: 24409 - protein, 3 aa, Artificial Sequence
  Synthetic construct
EVS

SEQ ID NO: 24410 - protein, 3 aa, Artificial Sequence
  Synthetic construct
DAS

SEQ ID NO: 24411 - protein, 3 aa, Artificial Sequence
  Synthetic construct
GNN

SEQ ID NO: 24412 - protein, 3 aa, Artificial Sequence
  Synthetic construct
WAS

SEQ ID NO: 24413 - protein, 3 aa, Artificial Sequence
  Synthetic construct
QAS

SEQ ID NO: 24414 - protein, 3 aa, Artificial Sequence
  Synthetic construct
TNS

SEQ ID NO: 24415 - protein, 3 aa, Artificial Sequence
  Synthetic construct
DVN

SEQ ID NO: 24416 - protein, 3 aa, Artificial Sequence
  Synthetic construct
GAS

SEQ ID NO: 24417 - protein, 3 aa, Artificial Sequence
  Synthetic construct
GNS

SEQ ID NO: 24418 - protein, 3 aa, Artificial Sequence
  Synthetic construct
NTN

SEQ ID NO: 24419 - protein, 3 aa, Artificial Sequence
  Synthetic construct
ATS

SEQ ID NO: 24420 - protein, 3 aa, Artificial Sequence
  Synthetic construct
AAS

SEQ ID NO: 24421 - protein, 3 aa, Artificial Sequence
  Synthetic construct
SNY

SEQ ID NO: 24422 - protein, 3 aa, Artificial Sequence
  Synthetic construct
EVF

SEQ ID NO: 24423 - protein, 3 aa, Artificial Sequence
  Synthetic construct
GAS

SEQ ID NO: 24424 - protein, 3 aa, Artificial Sequence
  Synthetic construct
EDS

SEQ ID NO: 24425 - protein, 3 aa, Artificial Sequence
  Synthetic construct
DVN

SEQ ID NO: 24426 - protein, 3 aa, Artificial Sequence
  Synthetic construct
EVS

SEQ ID NO: 24427 - protein, 3 aa, Artificial Sequence
  Synthetic construct
STS

SEQ ID NO: 24428 - protein, 3 aa, Artificial Sequence
  Synthetic construct
KIS

SEQ ID NO: 24429 - protein, 3 aa, Artificial Sequence
  Synthetic construct
EAS

SEQ ID NO: 24430 - protein, 3 aa, Artificial Sequence
  Synthetic construct
AAS

SEQ ID NO: 24431 - protein, 3 aa, Artificial Sequence
  Synthetic construct
EDT

SEQ ID NO: 24432 - protein, 3 aa, Artificial Sequence
  Synthetic construct
AAS

SEQ ID NO: 24433 - protein, 3 aa, Artificial Sequence
  Synthetic construct
AAS

SEQ ID NO: 24434 - protein, 3 aa, Artificial Sequence
  Synthetic construct
DVT

SEQ ID NO: 24435 - protein, 3 aa, Artificial Sequence
  Synthetic construct
DTI

SEQ ID NO: 24436 - protein, 3 aa, Artificial Sequence
  Synthetic construct
DVS

SEQ ID NO: 24437 - protein, 3 aa, Artificial Sequence
  Synthetic construct
WAS

SEQ ID NO: 24438 - protein, 3 aa, Artificial Sequence
  Synthetic construct
GAS

SEQ ID NO: 24439 - protein, 3 aa, Artificial Sequence
  Synthetic construct
LGS

SEQ ID NO: 24440 - protein, 3 aa, Artificial Sequence
  Synthetic construct
KAS

SEQ ID NO: 24441 - protein, 3 aa, Artificial Sequence
  Synthetic construct
AAS

SEQ ID NO: 24442 - protein, 3 aa, Artificial Sequence
  Synthetic construct
DVS

SEQ ID NO: 24443 - protein, 3 aa, Artificial Sequence
  Synthetic construct
EVS

SEQ ID NO: 24444 - protein, 3 aa, Artificial Sequence
  Synthetic construct
EVS

SEQ ID NO: 24445 - protein, 3 aa, Artificial Sequence
  Synthetic construct
DTS

SEQ ID NO: 24446 - protein, 3 aa, Artificial Sequence
  Synthetic construct
KDS

SEQ ID NO: 24447 - protein, 3 aa, Artificial Sequence
  Synthetic construct
GNN

SEQ ID NO: 24448 - protein, 3 aa, Artificial Sequence
  Synthetic construct
DVS

SEQ ID NO: 24449 - protein, 3 aa, Artificial Sequence
  Synthetic construct
DAS

SEQ ID NO: 24450 - protein, 3 aa, Artificial Sequence
  Synthetic construct
WSS

SEQ ID NO: 24451 - protein, 3 aa, Artificial Sequence
  Synthetic construct
QDS

SEQ ID NO: 24452 - protein, 3 aa, Artificial Sequence
  Synthetic construct
DAS

SEQ ID NO: 24453 - protein, 3 aa, Artificial Sequence
  Synthetic construct
AAS

SEQ ID NO: 24454 - protein, 3 aa, Artificial Sequence
  Synthetic construct
GAA

SEQ ID NO: 24455 - protein, 3 aa, Artificial Sequence
  Synthetic construct
GNN

SEQ ID NO: 24456 - protein, 3 aa, Artificial Sequence
  Synthetic construct
KDS

SEQ ID NO: 24457 - protein, 3 aa, Artificial Sequence
  Synthetic construct
GAS

SEQ ID NO: 24458 - protein, 3 aa, Artificial Sequence
  Synthetic construct
GNN

SEQ ID NO: 24459 - protein, 3 aa, Artificial Sequence
  Synthetic construct
GAS

SEQ ID NO: 24460 - protein, 3 aa, Artificial Sequence
  Synthetic construct
EDS

SEQ ID NO: 24461 - protein, 3 aa, Artificial Sequence
  Synthetic construct
EDN

SEQ ID NO: 24462 - protein, 3 aa, Artificial Sequence
  Synthetic construct
WAS

SEQ ID NO: 24463 - protein, 3 aa, Artificial Sequence
  Synthetic construct
AAS

SEQ ID NO: 24464 - protein, 3 aa, Artificial Sequence
  Synthetic construct
DAS

SEQ ID NO: 24465 - protein, 3 aa, Artificial Sequence
  Synthetic construct
GAS

SEQ ID NO: 24466 - protein, 3 aa, Artificial Sequence
  Synthetic construct
WAS

SEQ ID NO: 24467 - protein, 3 aa, Artificial Sequence
  Synthetic construct
GAS

SEQ ID NO: 24468 - protein, 3 aa, Artificial Sequence
  Synthetic construct
DVN

SEQ ID NO: 24469 - protein, 3 aa, Artificial Sequence
  Synthetic construct
EDS

SEQ ID NO: 24470 - protein, 3 aa, Artificial Sequence
  Synthetic construct
GAS

SEQ ID NO: 24471 - protein, 3 aa, Artificial Sequence
  Synthetic construct
DVS

SEQ ID NO: 24472 - protein, 3 aa, Artificial Sequence
  Synthetic construct
EDN

SEQ ID NO: 24473 - protein, 3 aa, Artificial Sequence
  Synthetic construct
DVN

SEQ ID NO: 24474 - protein, 3 aa, Artificial Sequence
  Synthetic construct
YES

SEQ ID NO: 24475 - protein, 3 aa, Artificial Sequence
  Synthetic construct
AAS

SEQ ID NO: 24476 - protein, 3 aa, Artificial Sequence
  Synthetic construct
EVS

SEQ ID NO: 24477 - protein, 3 aa, Artificial Sequence
  Synthetic construct
LGS

SEQ ID NO: 24478 - protein, 3 aa, Artificial Sequence
  Synthetic construct
DAS

SEQ ID NO: 24479 - protein, 3 aa, Artificial Sequence
  Synthetic construct
GAS

SEQ ID NO: 24480 - protein, 3 aa, Artificial Sequence
  Synthetic construct
AAS

SEQ ID NO: 24481 - protein, 3 aa, Artificial Sequence
  Synthetic construct
EAS

SEQ ID NO: 24482 - protein, 3 aa, Artificial Sequence
  Synthetic construct
ENS

SEQ ID NO: 24483 - protein, 3 aa, Artificial Sequence
  Synthetic construct
GAS

SEQ ID NO: 24484 - protein, 3 aa, Artificial Sequence
  Synthetic construct
DAS

SEQ ID NO: 24485 - protein, 3 aa, Artificial Sequence
  Synthetic construct
GAS

SEQ ID NO: 24486 - protein, 3 aa, Artificial Sequence
  Synthetic construct
NVS

SEQ ID NO: 24487 - protein, 3 aa, Artificial Sequence
  Synthetic construct
YDS

SEQ ID NO: 24488 - protein, 7 aa, Artificial Sequence
  Synthetic construct
LNSDGSH

SEQ ID NO: 24489 - protein, 3 aa, Artificial Sequence
  Synthetic construct
AAS

SEQ ID NO: 24490 - protein, 3 aa, Artificial Sequence
  Synthetic construct
GAS

SEQ ID NO: 24491 - protein, 3 aa, Artificial Sequence
  Synthetic construct
QDT

SEQ ID NO: 24492 - protein, 3 aa, Artificial Sequence
  Synthetic construct
ENN

SEQ ID NO: 24493 - protein, 3 aa, Artificial Sequence
  Synthetic construct
DTS

SEQ ID NO: 24494 - protein, 3 aa, Artificial Sequence
  Synthetic construct
EDN

SEQ ID NO: 24495 - protein, 3 aa, Artificial Sequence
  Synthetic construct
RNS

SEQ ID NO: 24496 - protein, 3 aa, Artificial Sequence
  Synthetic construct
DVN

SEQ ID NO: 24497 - protein, 3 aa, Artificial Sequence
  Synthetic construct
ENN

SEQ ID NO: 24498 - protein, 3 aa, Artificial Sequence
  Synthetic construct
AAS

SEQ ID NO: 24499 - protein, 3 aa, Artificial Sequence
  Synthetic construct
DAS

SEQ ID NO: 24500 - protein, 3 aa, Artificial Sequence
  Synthetic construct
AAS

SEQ ID NO: 24501 - protein, 3 aa, Artificial Sequence
  Synthetic construct
DAS

SEQ ID NO: 24502 - protein, 3 aa, Artificial Sequence
  Synthetic construct
KVS

SEQ ID NO: 24503 - protein, 3 aa, Artificial Sequence
  Synthetic construct
GNS

SEQ ID NO: 24504 - protein, 3 aa, Artificial Sequence
  Synthetic construct
DVN

SEQ ID NO: 24505 - protein, 3 aa, Artificial Sequence
  Synthetic construct
GAS

SEQ ID NO: 24506 - protein, 3 aa, Artificial Sequence
  Synthetic construct
EDN

SEQ ID NO: 24507 - protein, 3 aa, Artificial Sequence
  Synthetic construct
KVS

SEQ ID NO: 24508 - protein, 3 aa, Artificial Sequence
  Synthetic construct
DAS

SEQ ID NO: 24509 - protein, 3 aa, Artificial Sequence
  Synthetic construct
EVS

SEQ ID NO: 24510 - protein, 3 aa, Artificial Sequence
  Synthetic construct
AAS

SEQ ID NO: 24511 - protein, 3 aa, Artificial Sequence
  Synthetic construct
LGS

SEQ ID NO: 24512 - protein, 3 aa, Artificial Sequence
  Synthetic construct
DVS

SEQ ID NO: 24513 - protein, 3 aa, Artificial Sequence
  Synthetic construct
AAS

SEQ ID NO: 24514 - protein, 3 aa, Artificial Sequence
  Synthetic construct
QDT

SEQ ID NO: 24515 - protein, 3 aa, Artificial Sequence
  Synthetic construct
QDT

SEQ ID NO: 24516 - protein, 3 aa, Artificial Sequence
  Synthetic construct
LTN

SEQ ID NO: 24517 - protein, 3 aa, Artificial Sequence
  Synthetic construct
RDS

SEQ ID NO: 24518 - protein, 3 aa, Artificial Sequence
  Synthetic construct
RNS

SEQ ID NO: 24519 - protein, 3 aa, Artificial Sequence
  Synthetic construct
YVS

SEQ ID NO: 24520 - protein, 3 aa, Artificial Sequence
  Synthetic construct
AAS

SEQ ID NO: 24521 - protein, 3 aa, Artificial Sequence
  Synthetic construct
KVS

SEQ ID NO: 24522 - protein, 3 aa, Artificial Sequence
  Synthetic construct
ENN

SEQ ID NO: 24523 - protein, 3 aa, Artificial Sequence
  Synthetic construct
WAS

SEQ ID NO: 24524 - protein, 3 aa, Artificial Sequence
  Synthetic construct
DVT

SEQ ID NO: 24525 - protein, 3 aa, Artificial Sequence
  Synthetic construct
ENN

SEQ ID NO: 24526 - protein, 3 aa, Artificial Sequence
  Synthetic construct
DAS

SEQ ID NO: 24527 - protein, 3 aa, Artificial Sequence
  Synthetic construct
GAS

SEQ ID NO: 24528 - protein, 3 aa, Artificial Sequence
  Synthetic construct
AAS

SEQ ID NO: 24529 - protein, 3 aa, Artificial Sequence
  Synthetic construct
DSN

SEQ ID NO: 24530 - protein, 3 aa, Artificial Sequence
  Synthetic construct
GNN

SEQ ID NO: 24531 - protein, 3 aa, Artificial Sequence
  Synthetic construct
AAS

SEQ ID NO: 24532 - protein, 3 aa, Artificial Sequence
  Synthetic construct
DAS

SEQ ID NO: 24533 - protein, 3 aa, Artificial Sequence
  Synthetic construct
AAS

SEQ ID NO: 24534 - protein, 3 aa, Artificial Sequence
  Synthetic construct
DVG

SEQ ID NO: 24535 - protein, 3 aa, Artificial Sequence
  Synthetic construct
KDI

SEQ ID NO: 24536 - protein, 3 aa, Artificial Sequence
  Synthetic construct
RNN

SEQ ID NO: 24537 - protein, 3 aa, Artificial Sequence
  Synthetic construct
WAS

SEQ ID NO: 24538 - protein, 3 aa, Artificial Sequence
  Synthetic construct
DAS

SEQ ID NO: 24539 - protein, 3 aa, Artificial Sequence
  Synthetic construct
GAS

SEQ ID NO: 24540 - protein, 3 aa, Artificial Sequence
  Synthetic construct
KNG

SEQ ID NO: 24541 - protein, 3 aa, Artificial Sequence
  Synthetic construct
GTS

SEQ ID NO: 24542 - protein, 3 aa, Artificial Sequence
  Synthetic construct
RDH

SEQ ID NO: 24543 - protein, 3 aa, Artificial Sequence
  Synthetic construct
DAS

SEQ ID NO: 24544 - protein, 3 aa, Artificial Sequence
  Synthetic construct
QDN

SEQ ID NO: 24545 - protein, 3 aa, Artificial Sequence
  Synthetic construct
EDS

SEQ ID NO: 24546 - protein, 3 aa, Artificial Sequence
  Synthetic construct
END

SEQ ID NO: 24547 - protein, 3 aa, Artificial Sequence
  Synthetic construct
GAS

SEQ ID NO: 24548 - protein, 3 aa, Artificial Sequence
  Synthetic construct
DVS

SEQ ID NO: 24549 - protein, 3 aa, Artificial Sequence
  Synthetic construct
GAS

SEQ ID NO: 24550 - protein, 3 aa, Artificial Sequence
  Synthetic construct
DAS

SEQ ID NO: 24551 - protein, 3 aa, Artificial Sequence
  Synthetic construct
GAS

SEQ ID NO: 24552 - protein, 3 aa, Artificial Sequence
  Synthetic construct
KAS

SEQ ID NO: 24553 - protein, 3 aa, Artificial Sequence
  Synthetic construct
ENN

SEQ ID NO: 24554 - protein, 3 aa, Artificial Sequence
  Synthetic construct
KNN

SEQ ID NO: 24555 - protein, 3 aa, Artificial Sequence
  Synthetic construct
DAS

SEQ ID NO: 24556 - protein, 3 aa, Artificial Sequence
  Synthetic construct
YDG

SEQ ID NO: 24557 - protein, 3 aa, Artificial Sequence
  Synthetic construct
GAS

SEQ ID NO: 24558 - protein, 3 aa, Artificial Sequence
  Synthetic construct
EGS

SEQ ID NO: 24559 - protein, 3 aa, Artificial Sequence
  Synthetic construct
DAS

SEQ ID NO: 24560 - protein, 3 aa, Artificial Sequence
  Synthetic construct
KAS

SEQ ID NO: 24561 - protein, 3 aa, Artificial Sequence
  Synthetic construct
GAS

SEQ ID NO: 24562 - protein, 3 aa, Artificial Sequence
  Synthetic construct
GKN

SEQ ID NO: 24563 - protein, 3 aa, Artificial Sequence
  Synthetic construct
DVS

SEQ ID NO: 24564 - protein, 3 aa, Artificial Sequence
  Synthetic construct
DVS

SEQ ID NO: 24565 - protein, 3 aa, Artificial Sequence
  Synthetic construct
GAS

SEQ ID NO: 24566 - protein, 3 aa, Artificial Sequence
  Synthetic construct
GTS

SEQ ID NO: 24567 - protein, 3 aa, Artificial Sequence
  Synthetic construct
WAS

SEQ ID NO: 24568 - protein, 3 aa, Artificial Sequence
  Synthetic construct
DAS

SEQ ID NO: 24569 - protein, 3 aa, Artificial Sequence
  Synthetic construct
AAS

SEQ ID NO: 24570 - protein, 3 aa, Artificial Sequence
  Synthetic construct
DAS

SEQ ID NO: 24571 - protein, 3 aa, Artificial Sequence
  Synthetic construct
YAS

SEQ ID NO: 24572 - protein, 7 aa, Artificial Sequence
  Synthetic construct
LNSDGAH

SEQ ID NO: 24573 - protein, 3 aa, Artificial Sequence
  Synthetic construct
GAS

SEQ ID NO: 24574 - protein, 3 aa, Artificial Sequence
  Synthetic construct
QDS

SEQ ID NO: 24575 - protein, 3 aa, Artificial Sequence
  Synthetic construct
AAS

SEQ ID NO: 24576 - protein, 3 aa, Artificial Sequence
  Synthetic construct
LGS

SEQ ID NO: 24577 - protein, 3 aa, Artificial Sequence
  Synthetic construct
EVS

SEQ ID NO: 24578 - protein, 3 aa, Artificial Sequence
  Synthetic construct
KAS

SEQ ID NO: 24579 - protein, 3 aa, Artificial Sequence
  Synthetic construct
AAS

SEQ ID NO: 24580 - protein, 3 aa, Artificial Sequence
  Synthetic construct
WAS

SEQ ID NO: 24581 - protein, 3 aa, Artificial Sequence
  Synthetic construct
GAS

SEQ ID NO: 24582 - protein, 3 aa, Artificial Sequence
  Synthetic construct
WAS

SEQ ID NO: 24583 - protein, 3 aa, Artificial Sequence
  Synthetic construct
GHN

SEQ ID NO: 24584 - protein, 3 aa, Artificial Sequence
  Synthetic construct
AAS

SEQ ID NO: 24585 - protein, 3 aa, Artificial Sequence
  Synthetic construct
AAS

SEQ ID NO: 24586 - protein, 3 aa, Artificial Sequence
  Synthetic construct
EGS

SEQ ID NO: 24587 - protein, 3 aa, Artificial Sequence
  Synthetic construct
SAS

SEQ ID NO: 24588 - protein, 3 aa, Artificial Sequence
  Synthetic construct
GSS

SEQ ID NO: 24589 - protein, 3 aa, Artificial Sequence
  Synthetic construct
GAS

SEQ ID NO: 24590 - protein, 3 aa, Artificial Sequence
  Synthetic construct
AAS

SEQ ID NO: 24591 - protein, 3 aa, Artificial Sequence
  Synthetic construct
DAS

SEQ ID NO: 24592 - protein, 3 aa, Artificial Sequence
  Synthetic construct
GAS

SEQ ID NO: 24593 - protein, 3 aa, Artificial Sequence
  Synthetic construct
GAS

SEQ ID NO: 24594 - protein, 3 aa, Artificial Sequence
  Synthetic construct
DAS

SEQ ID NO: 24595 - protein, 3 aa, Artificial Sequence
  Synthetic construct
GAS

SEQ ID NO: 24596 - protein, 3 aa, Artificial Sequence
  Synthetic construct
QDN

SEQ ID NO: 24597 - protein, 3 aa, Artificial Sequence
  Synthetic construct
DAS

SEQ ID NO: 24598 - protein, 3 aa, Artificial Sequence
  Synthetic construct
EDS

SEQ ID NO: 24599 - protein, 3 aa, Artificial Sequence
  Synthetic construct
GAS

SEQ ID NO: 24600 - protein, 3 aa, Artificial Sequence
  Synthetic construct
GAS

SEQ ID NO: 24601 - protein, 3 aa, Artificial Sequence
  Synthetic construct
GAS

SEQ ID NO: 24602 - protein, 3 aa, Artificial Sequence
  Synthetic construct
RDG

SEQ ID NO: 24603 - protein, 3 aa, Artificial Sequence
  Synthetic construct
AAS

SEQ ID NO: 24604 - protein, 3 aa, Artificial Sequence
  Synthetic construct
DVN

SEQ ID NO: 24605 - protein, 3 aa, Artificial Sequence
  Synthetic construct
KVS

SEQ ID NO: 24606 - protein, 3 aa, Artificial Sequence
  Synthetic construct
EGS

SEQ ID NO: 24607 - protein, 3 aa, Artificial Sequence
  Synthetic construct
RNN

SEQ ID NO: 24608 - protein, 3 aa, Artificial Sequence
  Synthetic construct
DAS

SEQ ID NO: 24609 - protein, 3 aa, Artificial Sequence
  Synthetic construct
GKN

SEQ ID NO: 24610 - protein, 3 aa, Artificial Sequence
  Synthetic construct
GNS

SEQ ID NO: 24611 - protein, 3 aa, Artificial Sequence
  Synthetic construct
GNS

SEQ ID NO: 24612 - protein, 3 aa, Artificial Sequence
  Synthetic construct
GAS

SEQ ID NO: 24613 - protein, 3 aa, Artificial Sequence
  Synthetic construct
ESI

SEQ ID NO: 24614 - protein, 3 aa, Artificial Sequence
  Synthetic construct
EGS

SEQ ID NO: 24615 - protein, 3 aa, Artificial Sequence
  Synthetic construct
AAS

SEQ ID NO: 24616 - protein, 3 aa, Artificial Sequence
  Synthetic construct
DAS

SEQ ID NO: 24617 - protein, 3 aa, Artificial Sequence
  Synthetic construct
AAS

SEQ ID NO: 24618 - protein, 3 aa, Artificial Sequence
  Synthetic construct
EVS

SEQ ID NO: 24619 - protein, 3 aa, Artificial Sequence
  Synthetic construct
GAS

SEQ ID NO: 24620 - protein, 3 aa, Artificial Sequence
  Synthetic construct
KDT

SEQ ID NO: 24621 - protein, 3 aa, Artificial Sequence
  Synthetic construct
HAS

SEQ ID NO: 24622 - protein, 3 aa, Artificial Sequence
  Synthetic construct
SAS

SEQ ID NO: 24623 - protein, 3 aa, Artificial Sequence
  Synthetic construct
KAS

SEQ ID NO: 24624 - protein, 3 aa, Artificial Sequence
  Synthetic construct
EDS

SEQ ID NO: 24625 - protein, 3 aa, Artificial Sequence
  Synthetic construct
KAS

SEQ ID NO: 24626 - protein, 7 aa, Artificial Sequence
  Synthetic construct
VKSDGSH

SEQ ID NO: 24627 - protein, 3 aa, Artificial Sequence
  Synthetic construct
YDS

SEQ ID NO: 24628 - protein, 3 aa, Artificial Sequence
  Synthetic construct
EDS

SEQ ID NO: 24629 - protein, 3 aa, Artificial Sequence
  Synthetic construct
KAS

SEQ ID NO: 24630 - protein, 3 aa, Artificial Sequence
  Synthetic construct
GAS

SEQ ID NO: 24631 - protein, 3 aa, Artificial Sequence
  Synthetic construct
GAS

SEQ ID NO: 24632 - protein, 3 aa, Artificial Sequence
  Synthetic construct
AAS

SEQ ID NO: 24633 - protein, 3 aa, Artificial Sequence
  Synthetic construct
GAS

SEQ ID NO: 24634 - protein, 3 aa, Artificial Sequence
  Synthetic construct
TAS

SEQ ID NO: 24635 - protein, 3 aa, Artificial Sequence
  Synthetic construct
AAS

SEQ ID NO: 24636 - protein, 3 aa, Artificial Sequence
  Synthetic construct
YDS

SEQ ID NO: 24637 - protein, 3 aa, Artificial Sequence
  Synthetic construct
ENN

SEQ ID NO: 24638 - protein, 3 aa, Artificial Sequence
  Synthetic construct
GAS

SEQ ID NO: 24639 - protein, 3 aa, Artificial Sequence
  Synthetic construct
EGT

SEQ ID NO: 24640 - protein, 3 aa, Artificial Sequence
  Synthetic construct
QDT

SEQ ID NO: 24641 - protein, 3 aa, Artificial Sequence
  Synthetic construct
SND

SEQ ID NO: 24642 - protein, 3 aa, Artificial Sequence
  Synthetic construct
WSS

SEQ ID NO: 24643 - protein, 3 aa, Artificial Sequence
  Synthetic construct
WAS

SEQ ID NO: 24644 - protein, 3 aa, Artificial Sequence
  Synthetic construct
YAS

SEQ ID NO: 24645 - protein, 3 aa, Artificial Sequence
  Synthetic construct
WAS

SEQ ID NO: 24646 - protein, 3 aa, Artificial Sequence
  Synthetic construct
EAS

SEQ ID NO: 24647 - protein, 3 aa, Artificial Sequence
  Synthetic construct
EVS

SEQ ID NO: 24648 - protein, 3 aa, Artificial Sequence
  Synthetic construct
QDS

SEQ ID NO: 24649 - protein, 3 aa, Artificial Sequence
  Synthetic construct
LGS

SEQ ID NO: 24650 - protein, 3 aa, Artificial Sequence
  Synthetic construct
AAS

SEQ ID NO: 24651 - protein, 3 aa, Artificial Sequence
  Synthetic construct
QDS

SEQ ID NO: 24652 - protein, 3 aa, Artificial Sequence
  Synthetic construct
EDI

SEQ ID NO: 24653 - protein, 3 aa, Artificial Sequence
  Synthetic construct
EVS

SEQ ID NO: 24654 - protein, 3 aa, Artificial Sequence
  Synthetic construct
KDT

SEQ ID NO: 24655 - protein, 3 aa, Artificial Sequence
  Synthetic construct
DNN

SEQ ID NO: 24656 - protein, 3 aa, Artificial Sequence
  Synthetic construct
QDS

SEQ ID NO: 24657 - protein, 3 aa, Artificial Sequence
  Synthetic construct
EVS

SEQ ID NO: 24658 - protein, 3 aa, Artificial Sequence
  Synthetic construct
LGS

SEQ ID NO: 24659 - protein, 3 aa, Artificial Sequence
  Synthetic construct
GAS

SEQ ID NO: 24660 - protein, 3 aa, Artificial Sequence
  Synthetic construct
VNS

SEQ ID NO: 24661 - protein, 3 aa, Artificial Sequence
  Synthetic construct
WAS

SEQ ID NO: 24662 - protein, 3 aa, Artificial Sequence
  Synthetic construct
DAS

SEQ ID NO: 24663 - protein, 3 aa, Artificial Sequence
  Synthetic construct
RDN

SEQ ID NO: 24664 - protein, 3 aa, Artificial Sequence
  Synthetic construct
LGS

SEQ ID NO: 24665 - protein, 3 aa, Artificial Sequence
  Synthetic construct
DSS

SEQ ID NO: 24666 - protein, 3 aa, Artificial Sequence
  Synthetic construct
WSS

SEQ ID NO: 24667 - protein, 3 aa, Artificial Sequence
  Synthetic construct
EVT

SEQ ID NO: 24668 - protein, 3 aa, Artificial Sequence
  Synthetic construct
DNN

SEQ ID NO: 24669 - protein, 3 aa, Artificial Sequence
  Synthetic construct
ELS

SEQ ID NO: 24670 - protein, 3 aa, Artificial Sequence
  Synthetic construct
QGT

SEQ ID NO: 24671 - protein, 3 aa, Artificial Sequence
  Synthetic construct
STS

SEQ ID NO: 24672 - protein, 3 aa, Artificial Sequence
  Synthetic construct
EVS

SEQ ID NO: 24673 - protein, 3 aa, Artificial Sequence
  Synthetic construct
DAS

SEQ ID NO: 24674 - protein, 3 aa, Artificial Sequence
  Synthetic construct
KAS

SEQ ID NO: 24675 - protein, 3 aa, Artificial Sequence
  Synthetic construct
GNS

SEQ ID NO: 24676 - protein, 3 aa, Artificial Sequence
  Synthetic construct
SIN

SEQ ID NO: 24677 - protein, 3 aa, Artificial Sequence
  Synthetic construct
GAS

SEQ ID NO: 24678 - protein, 3 aa, Artificial Sequence
  Synthetic construct
DAS

SEQ ID NO: 24679 - protein, 3 aa, Artificial Sequence
  Synthetic construct
DNN

SEQ ID NO: 24680 - protein, 3 aa, Artificial Sequence
  Synthetic construct
GAS

SEQ ID NO: 24681 - protein, 3 aa, Artificial Sequence
  Synthetic construct
AAS

SEQ ID NO: 24682 - protein, 3 aa, Artificial Sequence
  Synthetic construct
QNT

SEQ ID NO: 24683 - protein, 3 aa, Artificial Sequence
  Synthetic construct
GNS

SEQ ID NO: 24684 - protein, 3 aa, Artificial Sequence
  Synthetic construct
KAS

SEQ ID NO: 24685 - protein, 3 aa, Artificial Sequence
  Synthetic construct
AAS

SEQ ID NO: 24686 - protein, 3 aa, Artificial Sequence
  Synthetic construct
QDN

SEQ ID NO: 24687 - protein, 3 aa, Artificial Sequence
  Synthetic construct
EDS

SEQ ID NO: 24688 - protein, 3 aa, Artificial Sequence
  Synthetic construct
AAT

SEQ ID NO: 24689 - protein, 3 aa, Artificial Sequence
  Synthetic construct
YDS

SEQ ID NO: 24690 - protein, 3 aa, Artificial Sequence
  Synthetic construct
DAS

SEQ ID NO: 24691 - protein, 3 aa, Artificial Sequence
  Synthetic construct
GAS

SEQ ID NO: 24692 - protein, 3 aa, Artificial Sequence
  Synthetic construct
DVS

SEQ ID NO: 24693 - protein, 3 aa, Artificial Sequence
  Synthetic construct
WAS

SEQ ID NO: 24694 - protein, 3 aa, Artificial Sequence
  Synthetic construct
AAS

SEQ ID NO: 24695 - protein, 3 aa, Artificial Sequence
  Synthetic construct
RNN

SEQ ID NO: 24696 - protein, 3 aa, Artificial Sequence
  Synthetic construct
EDS

SEQ ID NO: 24697 - protein, 3 aa, Artificial Sequence
  Synthetic construct
AAS

SEQ ID NO: 24698 - protein, 3 aa, Artificial Sequence
  Synthetic construct
AAS

SEQ ID NO: 24699 - protein, 3 aa, Artificial Sequence
  Synthetic construct
AAS

SEQ ID NO: 24700 - protein, 3 aa, Artificial Sequence
  Synthetic construct
DVN

SEQ ID NO: 24701 - protein, 3 aa, Artificial Sequence
  Synthetic construct
AAS

SEQ ID NO: 24702 - protein, 3 aa, Artificial Sequence
  Synthetic construct
WAS

SEQ ID NO: 24703 - protein, 3 aa, Artificial Sequence
  Synthetic construct
DAS

SEQ ID NO: 24704 - protein, 3 aa, Artificial Sequence
  Synthetic construct
DNN

SEQ ID NO: 24705 - protein, 3 aa, Artificial Sequence
  Synthetic construct
RNN

SEQ ID NO: 24706 - protein, 3 aa, Artificial Sequence
  Synthetic construct
AAS

SEQ ID NO: 24707 - protein, 3 aa, Artificial Sequence
  Synthetic construct
GAS

SEQ ID NO: 24708 - protein, 3 aa, Artificial Sequence
  Synthetic construct
AAS

SEQ ID NO: 24709 - protein, 3 aa, Artificial Sequence
  Synthetic construct
QDN

SEQ ID NO: 24710 - protein, 3 aa, Artificial Sequence
  Synthetic construct
DNN

SEQ ID NO: 24711 - protein, 3 aa, Artificial Sequence
  Synthetic construct
AAS

SEQ ID NO: 24712 - protein, 3 aa, Artificial Sequence
  Synthetic construct
DGS

SEQ ID NO: 24713 - protein, 3 aa, Artificial Sequence
  Synthetic construct
EDT

SEQ ID NO: 24714 - protein, 3 aa, Artificial Sequence
  Synthetic construct
WAS

SEQ ID NO: 24715 - protein, 3 aa, Artificial Sequence
  Synthetic construct
EDS

SEQ ID NO: 24716 - protein, 3 aa, Artificial Sequence
  Synthetic construct
RAS

SEQ ID NO: 24717 - protein, 3 aa, Artificial Sequence
  Synthetic construct
YDA

SEQ ID NO: 24718 - protein, 3 aa, Artificial Sequence
  Synthetic construct
SND

SEQ ID NO: 24719 - protein, 3 aa, Artificial Sequence
  Synthetic construct
AAS

SEQ ID NO: 24720 - protein, 3 aa, Artificial Sequence
  Synthetic construct
QDT

SEQ ID NO: 24721 - protein, 3 aa, Artificial Sequence
  Synthetic construct
VNS

SEQ ID NO: 24722 - protein, 3 aa, Artificial Sequence
  Synthetic construct
DNS

SEQ ID NO: 24723 - protein, 3 aa, Artificial Sequence
  Synthetic construct
EDS

SEQ ID NO: 24724 - protein, 3 aa, Artificial Sequence
  Synthetic construct
AAS

SEQ ID NO: 24725 - protein, 3 aa, Artificial Sequence
  Synthetic construct
DAS

SEQ ID NO: 24726 - protein, 3 aa, Artificial Sequence
  Synthetic construct
DNN

SEQ ID NO: 24727 - protein, 3 aa, Artificial Sequence
  Synthetic construct
GNS

SEQ ID NO: 24728 - protein, 3 aa, Artificial Sequence
  Synthetic construct
EVS

SEQ ID NO: 24729 - protein, 3 aa, Artificial Sequence
  Synthetic construct
GAS

SEQ ID NO: 24730 - protein, 3 aa, Artificial Sequence
  Synthetic construct
GKN

SEQ ID NO: 24731 - protein, 3 aa, Artificial Sequence
  Synthetic construct
DVS

SEQ ID NO: 24732 - protein, 3 aa, Artificial Sequence
  Synthetic construct
EDN

SEQ ID NO: 24733 - protein, 3 aa, Artificial Sequence
  Synthetic construct
GNN

SEQ ID NO: 24734 - protein, 3 aa, Artificial Sequence
  Synthetic construct
EDN

SEQ ID NO: 24735 - protein, 3 aa, Artificial Sequence
  Synthetic construct
DTS

SEQ ID NO: 24736 - protein, 3 aa, Artificial Sequence
  Synthetic construct
EAY

SEQ ID NO: 24737 - protein, 3 aa, Artificial Sequence
  Synthetic construct
DAS

SEQ ID NO: 24738 - protein, 3 aa, Artificial Sequence
  Synthetic construct
AAS

SEQ ID NO: 24739 - protein, 3 aa, Artificial Sequence
  Synthetic construct
GAS

SEQ ID NO: 24740 - protein, 3 aa, Artificial Sequence
  Synthetic construct
ELS

SEQ ID NO: 24741 - protein, 3 aa, Artificial Sequence
  Synthetic construct
DAS

SEQ ID NO: 24742 - protein, 3 aa, Artificial Sequence
  Synthetic construct
GAS

SEQ ID NO: 24743 - protein, 3 aa, Artificial Sequence
  Synthetic construct
AAS

SEQ ID NO: 24744 - protein, 3 aa, Artificial Sequence
  Synthetic construct
KAS

SEQ ID NO: 24745 - protein, 3 aa, Artificial Sequence
  Synthetic construct
AAS

SEQ ID NO: 24746 - protein, 3 aa, Artificial Sequence
  Synthetic construct
ENN

SEQ ID NO: 24747 - protein, 3 aa, Artificial Sequence
  Synthetic construct
DNN

SEQ ID NO: 24748 - protein, 3 aa, Artificial Sequence
  Synthetic construct
NNI

SEQ ID NO: 24749 - protein, 3 aa, Artificial Sequence
  Synthetic construct
WAS

SEQ ID NO: 24750 - protein, 3 aa, Artificial Sequence
  Synthetic construct
AAS

SEQ ID NO: 24751 - protein, 3 aa, Artificial Sequence
  Synthetic construct
GAS

SEQ ID NO: 24752 - protein, 3 aa, Artificial Sequence
  Synthetic construct
DAS

SEQ ID NO: 24753 - protein, 3 aa, Artificial Sequence
  Synthetic construct
GAS

SEQ ID NO: 24754 - protein, 3 aa, Artificial Sequence
  Synthetic construct
GKS

SEQ ID NO: 24755 - protein, 3 aa, Artificial Sequence
  Synthetic construct
EDN

SEQ ID NO: 24756 - protein, 3 aa, Artificial Sequence
  Synthetic construct
EDS

SEQ ID NO: 24757 - protein, 3 aa, Artificial Sequence
  Synthetic construct
EDN

SEQ ID NO: 24758 - protein, 3 aa, Artificial Sequence
  Synthetic construct
GTS

SEQ ID NO: 24759 - protein, 3 aa, Artificial Sequence
  Synthetic construct
GAS

SEQ ID NO: 24760 - protein, 3 aa, Artificial Sequence
  Synthetic construct
DVT

SEQ ID NO: 24761 - protein, 7 aa, Artificial Sequence
  Synthetic construct
YLSDSNR

SEQ ID NO: 24762 - protein, 3 aa, Artificial Sequence
  Synthetic construct
AAS

SEQ ID NO: 24763 - protein, 3 aa, Artificial Sequence
  Synthetic construct
LGS

SEQ ID NO: 24764 - protein, 3 aa, Artificial Sequence
  Synthetic construct
DVS

SEQ ID NO: 24765 - protein, 3 aa, Artificial Sequence
  Synthetic construct
AAS

SEQ ID NO: 24766 - protein, 3 aa, Artificial Sequence
  Synthetic construct
SNN

SEQ ID NO: 24767 - protein, 3 aa, Artificial Sequence
  Synthetic construct
DNN

SEQ ID NO: 24768 - protein, 3 aa, Artificial Sequence
  Synthetic construct
AAT

SEQ ID NO: 24769 - protein, 3 aa, Artificial Sequence
  Synthetic construct
GNN

SEQ ID NO: 24770 - protein, 3 aa, Artificial Sequence
  Synthetic construct
YDG

SEQ ID NO: 24771 - protein, 3 aa, Artificial Sequence
  Synthetic construct
AAS

SEQ ID NO: 24772 - protein, 3 aa, Artificial Sequence
  Synthetic construct
GAS

SEQ ID NO: 24773 - protein, 3 aa, Artificial Sequence
  Synthetic construct
GAS

SEQ ID NO: 24774 - protein, 3 aa, Artificial Sequence
  Synthetic construct
DVS

SEQ ID NO: 24775 - protein, 3 aa, Artificial Sequence
  Synthetic construct
DVT

SEQ ID NO: 24776 - protein, 3 aa, Artificial Sequence
  Synthetic construct
HDS

SEQ ID NO: 24777 - protein, 3 aa, Artificial Sequence
  Synthetic construct
GAS

SEQ ID NO: 24778 - protein, 3 aa, Artificial Sequence
  Synthetic construct
DVS

SEQ ID NO: 24779 - protein, 3 aa, Artificial Sequence
  Synthetic construct
EDS

SEQ ID NO: 24780 - protein, 3 aa, Artificial Sequence
  Synthetic construct
QDS

SEQ ID NO: 24781 - protein, 3 aa, Artificial Sequence
  Synthetic construct
VAS

SEQ ID NO: 24782 - protein, 3 aa, Artificial Sequence
  Synthetic construct
EDS

SEQ ID NO: 24783 - protein, 3 aa, Artificial Sequence
  Synthetic construct
DVS

SEQ ID NO: 24784 - protein, 3 aa, Artificial Sequence
  Synthetic construct
EVS

SEQ ID NO: 24785 - protein, 3 aa, Artificial Sequence
  Synthetic construct
EVS

SEQ ID NO: 24786 - protein, 3 aa, Artificial Sequence
  Synthetic construct
DTS

SEQ ID NO: 24787 - protein, 3 aa, Artificial Sequence
  Synthetic construct
DAS

SEQ ID NO: 24788 - protein, 3 aa, Artificial Sequence
  Synthetic construct
GAS

SEQ ID NO: 24789 - protein, 3 aa, Artificial Sequence
  Synthetic construct
DAS

SEQ ID NO: 24790 - protein, 3 aa, Artificial Sequence
  Synthetic construct
DVS

SEQ ID NO: 24791 - protein, 3 aa, Artificial Sequence
  Synthetic construct
KAS

SEQ ID NO: 24792 - protein, 3 aa, Artificial Sequence
  Synthetic construct
AAS

SEQ ID NO: 24793 - protein, 3 aa, Artificial Sequence
  Synthetic construct
YAS

SEQ ID NO: 24794 - protein, 3 aa, Artificial Sequence
  Synthetic construct
QDN

SEQ ID NO: 24795 - protein, 3 aa, Artificial Sequence
  Synthetic construct
YDS

SEQ ID NO: 24796 - protein, 3 aa, Artificial Sequence
  Synthetic construct
AAS

SEQ ID NO: 24797 - protein, 3 aa, Artificial Sequence
  Synthetic construct
DVS

SEQ ID NO: 24798 - protein, 3 aa, Artificial Sequence
  Synthetic construct
YDS

SEQ ID NO: 24799 - protein, 3 aa, Artificial Sequence
  Synthetic construct
LGS

SEQ ID NO: 24800 - protein, 3 aa, Artificial Sequence
  Synthetic construct
DVS

SEQ ID NO: 24801 - protein, 3 aa, Artificial Sequence
  Synthetic construct
HDS

SEQ ID NO: 24802 - protein, 3 aa, Artificial Sequence
  Synthetic construct
GAS

SEQ ID NO: 24803 - protein, 3 aa, Artificial Sequence
  Synthetic construct
AAS

SEQ ID NO: 24804 - protein, 3 aa, Artificial Sequence
  Synthetic construct
KAS

SEQ ID NO: 24805 - protein, 3 aa, Artificial Sequence
  Synthetic construct
AAS

SEQ ID NO: 24806 - protein, 3 aa, Artificial Sequence
  Synthetic construct
DAS

SEQ ID NO: 24807 - protein, 3 aa, Artificial Sequence
  Synthetic construct
EVI

SEQ ID NO: 24808 - protein, 3 aa, Artificial Sequence
  Synthetic construct
ENT

SEQ ID NO: 24809 - protein, 3 aa, Artificial Sequence
  Synthetic construct
DNN

SEQ ID NO: 24810 - protein, 3 aa, Artificial Sequence
  Synthetic construct
EGS

SEQ ID NO: 24811 - protein, 3 aa, Artificial Sequence
  Synthetic construct
NNG

SEQ ID NO: 24812 - protein, 3 aa, Artificial Sequence
  Synthetic construct
TNS

SEQ ID NO: 24813 - protein, 3 aa, Artificial Sequence
  Synthetic construct
ASS

SEQ ID NO: 24814 - protein, 3 aa, Artificial Sequence
  Synthetic construct
GAS

SEQ ID NO: 24815 - protein, 3 aa, Artificial Sequence
  Synthetic construct
KAS

SEQ ID NO: 24816 - protein, 3 aa, Artificial Sequence
  Synthetic construct
AAS

SEQ ID NO: 24817 - protein, 3 aa, Artificial Sequence
  Synthetic construct
SND

SEQ ID NO: 24818 - protein, 3 aa, Artificial Sequence
  Synthetic construct
AAS

SEQ ID NO: 24819 - protein, 3 aa, Artificial Sequence
  Synthetic construct
AAS

SEQ ID NO: 24820 - protein, 3 aa, Artificial Sequence
  Synthetic construct
DVS

SEQ ID NO: 24821 - protein, 3 aa, Artificial Sequence
  Synthetic construct
EDT

SEQ ID NO: 24822 - protein, 8 aa, Artificial Sequence
  Synthetic construct
VGTGGIVG

SEQ ID NO: 24823 - protein, 3 aa, Artificial Sequence
  Synthetic construct
GNN

SEQ ID NO: 24824 - protein, 3 aa, Artificial Sequence
  Synthetic construct
EDS

SEQ ID NO: 24825 - protein, 3 aa, Artificial Sequence
  Synthetic construct
GAS

SEQ ID NO: 24826 - protein, 3 aa, Artificial Sequence
  Synthetic construct
LGS

SEQ ID NO: 24827 - protein, 3 aa, Artificial Sequence
  Synthetic construct
DAS

SEQ ID NO: 24828 - protein, 3 aa, Artificial Sequence
  Synthetic construct
EVS

SEQ ID NO: 24829 - protein, 3 aa, Artificial Sequence
  Synthetic construct
KDS

SEQ ID NO: 24830 - protein, 3 aa, Artificial Sequence
  Synthetic construct
EDS

SEQ ID NO: 24831 - protein, 3 aa, Artificial Sequence
  Synthetic construct
GAS

SEQ ID NO: 24832 - protein, 3 aa, Artificial Sequence
  Synthetic construct
EDT

SEQ ID NO: 24833 - protein, 3 aa, Artificial Sequence
  Synthetic construct
YAS

SEQ ID NO: 24834 - protein, 3 aa, Artificial Sequence
  Synthetic construct
DAS

SEQ ID NO: 24835 - protein, 3 aa, Artificial Sequence
  Synthetic construct
AAS

SEQ ID NO: 24836 - protein, 3 aa, Artificial Sequence
  Synthetic construct
EDN

SEQ ID NO: 24837 - protein, 3 aa, Artificial Sequence
  Synthetic construct
GNT

SEQ ID NO: 24838 - protein, 3 aa, Artificial Sequence
  Synthetic construct
GAS

SEQ ID NO: 24839 - protein, 3 aa, Artificial Sequence
  Synthetic construct
KAS

SEQ ID NO: 24840 - protein, 3 aa, Artificial Sequence
  Synthetic construct
KIS

SEQ ID NO: 24841 - protein, 3 aa, Artificial Sequence
  Synthetic construct
ANS

SEQ ID NO: 24842 - protein, 3 aa, Artificial Sequence
  Synthetic construct
DAS

SEQ ID NO: 24843 - protein, 3 aa, Artificial Sequence
  Synthetic construct
GAS

SEQ ID NO: 24844 - protein, 3 aa, Artificial Sequence
  Synthetic construct
GAS

SEQ ID NO: 24845 - protein, 3 aa, Artificial Sequence
  Synthetic construct
GSS

SEQ ID NO: 24846 - protein, 3 aa, Artificial Sequence
  Synthetic construct
RNN

SEQ ID NO: 24847 - protein, 3 aa, Artificial Sequence
  Synthetic construct
DAS

SEQ ID NO: 24848 - protein, 3 aa, Artificial Sequence
  Synthetic construct
EDS

SEQ ID NO: 24849 - protein, 3 aa, Artificial Sequence
  Synthetic construct
EVS

SEQ ID NO: 24850 - protein, 3 aa, Artificial Sequence
  Synthetic construct
GAS

SEQ ID NO: 24851 - protein, 3 aa, Artificial Sequence
  Synthetic construct
GAS

SEQ ID NO: 24852 - protein, 3 aa, Artificial Sequence
  Synthetic construct
DAS

SEQ ID NO: 24853 - protein, 3 aa, Artificial Sequence
  Synthetic construct
DAS

SEQ ID NO: 24854 - protein, 3 aa, Artificial Sequence
  Synthetic construct
DAS

SEQ ID NO: 24855 - protein, 3 aa, Artificial Sequence
  Synthetic construct
KAS

SEQ ID NO: 24856 - protein, 3 aa, Artificial Sequence
  Synthetic construct
AAS

SEQ ID NO: 24857 - protein, 3 aa, Artificial Sequence
  Synthetic construct
IVD

SEQ ID NO: 24858 - protein, 3 aa, Artificial Sequence
  Synthetic construct
GAS

SEQ ID NO: 24859 - protein, 3 aa, Artificial Sequence
  Synthetic construct
GSS

SEQ ID NO: 24860 - protein, 3 aa, Artificial Sequence
  Synthetic construct
EGS

SEQ ID NO: 24861 - protein, 3 aa, Artificial Sequence
  Synthetic construct
GAS

SEQ ID NO: 24862 - protein, 3 aa, Artificial Sequence
  Synthetic construct
QDR

SEQ ID NO: 24863 - protein, 3 aa, Artificial Sequence
  Synthetic construct
ENN

SEQ ID NO: 24864 - protein, 3 aa, Artificial Sequence
  Synthetic construct
QDN

SEQ ID NO: 24865 - protein, 3 aa, Artificial Sequence
  Synthetic construct
GEN

SEQ ID NO: 24866 - protein, 3 aa, Artificial Sequence
  Synthetic construct
EDS

SEQ ID NO: 24867 - protein, 3 aa, Artificial Sequence
  Synthetic construct
GNS

SEQ ID NO: 24868 - protein, 3 aa, Artificial Sequence
  Synthetic construct
DAS

SEQ ID NO: 24869 - protein, 3 aa, Artificial Sequence
  Synthetic construct
DAS

SEQ ID NO: 24870 - protein, 3 aa, Artificial Sequence
  Synthetic construct
DVS

SEQ ID NO: 24871 - protein, 3 aa, Artificial Sequence
  Synthetic construct
LGS

SEQ ID NO: 24872 - protein, 3 aa, Artificial Sequence
  Synthetic construct
WAS

SEQ ID NO: 24873 - protein, 3 aa, Artificial Sequence
  Synthetic construct
GAS

SEQ ID NO: 24874 - protein, 3 aa, Artificial Sequence
  Synthetic construct
SDI

SEQ ID NO: 24875 - protein, 3 aa, Artificial Sequence
  Synthetic construct
DAS

SEQ ID NO: 24876 - protein, 3 aa, Artificial Sequence
  Synthetic construct
WAS

SEQ ID NO: 24877 - protein, 3 aa, Artificial Sequence
  Synthetic construct
DVS

SEQ ID NO: 24878 - protein, 3 aa, Artificial Sequence
  Synthetic construct
KAS

SEQ ID NO: 24879 - protein, 3 aa, Artificial Sequence
  Synthetic construct
DVS

SEQ ID NO: 24880 - protein, 3 aa, Artificial Sequence
  Synthetic construct
GVS

SEQ ID NO: 24881 - protein, 3 aa, Artificial Sequence
  Synthetic construct
DVS

SEQ ID NO: 24882 - protein, 3 aa, Artificial Sequence
  Synthetic construct
DVN

SEQ ID NO: 24883 - protein, 3 aa, Artificial Sequence
  Synthetic construct
ANN

SEQ ID NO: 24884 - protein, 3 aa, Artificial Sequence
  Synthetic construct
GAS

SEQ ID NO: 24885 - protein, 3 aa, Artificial Sequence
  Synthetic construct
QDT

SEQ ID NO: 24886 - protein, 3 aa, Artificial Sequence
  Synthetic construct
KVS

SEQ ID NO: 24887 - protein, 3 aa, Artificial Sequence
  Synthetic construct
AAS

SEQ ID NO: 24888 - protein, 3 aa, Artificial Sequence
  Synthetic construct
DVS

SEQ ID NO: 24889 - protein, 3 aa, Artificial Sequence
  Synthetic construct
EDS

SEQ ID NO: 24890 - protein, 3 aa, Artificial Sequence
  Synthetic construct
NND

SEQ ID NO: 24891 - protein, 3 aa, Artificial Sequence
  Synthetic construct
SDD

SEQ ID NO: 24892 - protein, 3 aa, Artificial Sequence
  Synthetic construct
DAS

SEQ ID NO: 24893 - protein, 3 aa, Artificial Sequence
  Synthetic construct
GNS

SEQ ID NO: 24894 - protein, 3 aa, Artificial Sequence
  Synthetic construct
QDS

SEQ ID NO: 24895 - protein, 3 aa, Artificial Sequence
  Synthetic construct
EFS

SEQ ID NO: 24896 - protein, 3 aa, Artificial Sequence
  Synthetic construct
EGS

SEQ ID NO: 24897 - protein, 3 aa, Artificial Sequence
  Synthetic construct
EVS

SEQ ID NO: 24898 - protein, 3 aa, Artificial Sequence
  Synthetic construct
EGS

SEQ ID NO: 24899 - protein, 3 aa, Artificial Sequence
  Synthetic construct
EDS

SEQ ID NO: 24900 - protein, 3 aa, Artificial Sequence
  Synthetic construct
EVS

SEQ ID NO: 24901 - protein, 3 aa, Artificial Sequence
  Synthetic construct
GAS

SEQ ID NO: 24902 - protein, 3 aa, Artificial Sequence
  Synthetic construct
WSS

SEQ ID NO: 24903 - protein, 3 aa, Artificial Sequence
  Synthetic construct
LGS

SEQ ID NO: 24904 - protein, 3 aa, Artificial Sequence
  Synthetic construct
YAS

SEQ ID NO: 24905 - protein, 3 aa, Artificial Sequence
  Synthetic construct
AAS

SEQ ID NO: 24906 - protein, 3 aa, Artificial Sequence
  Synthetic construct
TNN

SEQ ID NO: 24907 - protein, 3 aa, Artificial Sequence
  Synthetic construct
DNN

SEQ ID NO: 24908 - protein, 3 aa, Artificial Sequence
  Synthetic construct
DAS

SEQ ID NO: 24909 - protein, 3 aa, Artificial Sequence
  Synthetic construct
WAS

SEQ ID NO: 24910 - protein, 3 aa, Artificial Sequence
  Synthetic construct
EDS

SEQ ID NO: 24911 - protein, 3 aa, Artificial Sequence
  Synthetic construct
GAS

SEQ ID NO: 24912 - protein, 3 aa, Artificial Sequence
  Synthetic construct
GAS

SEQ ID NO: 24913 - protein, 3 aa, Artificial Sequence
  Synthetic construct
GAS

SEQ ID NO: 24914 - protein, 3 aa, Artificial Sequence
  Synthetic construct
DAS

SEQ ID NO: 24915 - protein, 3 aa, Artificial Sequence
  Synthetic construct
TLS

SEQ ID NO: 24916 - protein, 3 aa, Artificial Sequence
  Synthetic construct
DAS

SEQ ID NO: 24917 - protein, 3 aa, Artificial Sequence
  Synthetic construct
EDS

SEQ ID NO: 24918 - protein, 3 aa, Artificial Sequence
  Synthetic construct
AAS

SEQ ID NO: 24919 - protein, 3 aa, Artificial Sequence
  Synthetic construct
DAS

SEQ ID NO: 24920 - protein, 3 aa, Artificial Sequence
  Synthetic construct
GAS

SEQ ID NO: 24921 - protein, 3 aa, Artificial Sequence
  Synthetic construct
DAS

SEQ ID NO: 24922 - protein, 3 aa, Artificial Sequence
  Synthetic construct
LGS

SEQ ID NO: 24923 - protein, 3 aa, Artificial Sequence
  Synthetic construct
GAS

SEQ ID NO: 24924 - protein, 3 aa, Artificial Sequence
  Synthetic construct
WAS

SEQ ID NO: 24925 - protein, 3 aa, Artificial Sequence
  Synthetic construct
GAS

SEQ ID NO: 24926 - protein, 3 aa, Artificial Sequence
  Synthetic construct
RNN

SEQ ID NO: 24927 - protein, 3 aa, Artificial Sequence
  Synthetic construct
DAS

SEQ ID NO: 24928 - protein, 3 aa, Artificial Sequence
  Synthetic construct
DAS

SEQ ID NO: 24929 - protein, 3 aa, Artificial Sequence
  Synthetic construct
DAS

SEQ ID NO: 24930 - protein, 3 aa, Artificial Sequence
  Synthetic construct
GAS

SEQ ID NO: 24931 - protein, 3 aa, Artificial Sequence
  Synthetic construct
DAS

SEQ ID NO: 24932 - protein, 3 aa, Artificial Sequence
  Synthetic construct
ENN

SEQ ID NO: 24933 - protein, 3 aa, Artificial Sequence
  Synthetic construct
DVS

SEQ ID NO: 24934 - protein, 3 aa, Artificial Sequence
  Synthetic construct
EDS

SEQ ID NO: 24935 - protein, 3 aa, Artificial Sequence
  Synthetic construct
GAS

SEQ ID NO: 24936 - protein, 3 aa, Artificial Sequence
  Synthetic construct
AAS

SEQ ID NO: 24937 - protein, 3 aa, Artificial Sequence
  Synthetic construct
GNS

SEQ ID NO: 24938 - protein, 3 aa, Artificial Sequence
  Synthetic construct
GAS

SEQ ID NO: 24939 - protein, 3 aa, Artificial Sequence
  Synthetic construct
GAS

SEQ ID NO: 24940 - protein, 3 aa, Artificial Sequence
  Synthetic construct
AAS

SEQ ID NO: 24941 - protein, 3 aa, Artificial Sequence
  Synthetic construct
GAS

SEQ ID NO: 24942 - protein, 3 aa, Artificial Sequence
  Synthetic construct
EGS

SEQ ID NO: 24943 - protein, 3 aa, Artificial Sequence
  Synthetic construct
GES

SEQ ID NO: 24944 - protein, 3 aa, Artificial Sequence
  Synthetic construct
AAS

SEQ ID NO: 24945 - protein, 3 aa, Artificial Sequence
  Synthetic construct
DNN

SEQ ID NO: 24946 - protein, 3 aa, Artificial Sequence
  Synthetic construct
GAS

SEQ ID NO: 24947 - protein, 3 aa, Artificial Sequence
  Synthetic construct
AAS

SEQ ID NO: 24948 - protein, 3 aa, Artificial Sequence
  Synthetic construct
AAS

SEQ ID NO: 24949 - protein, 3 aa, Artificial Sequence
  Synthetic construct
MVS

SEQ ID NO: 24950 - protein, 3 aa, Artificial Sequence
  Synthetic construct
TNN

SEQ ID NO: 24951 - protein, 3 aa, Artificial Sequence
  Synthetic construct
LGS

SEQ ID NO: 24952 - protein, 3 aa, Artificial Sequence
  Synthetic construct
WAS

SEQ ID NO: 24953 - protein, 3 aa, Artificial Sequence
  Synthetic construct
YDD

SEQ ID NO: 24954 - protein, 3 aa, Artificial Sequence
  Synthetic construct
EDT

SEQ ID NO: 24955 - protein, 3 aa, Artificial Sequence
  Synthetic construct
QNS

SEQ ID NO: 24956 - protein, 3 aa, Artificial Sequence
  Synthetic construct
EVS

SEQ ID NO: 24957 - protein, 3 aa, Artificial Sequence
  Synthetic construct
DAS

SEQ ID NO: 24958 - protein, 3 aa, Artificial Sequence
  Synthetic construct
GAS

SEQ ID NO: 24959 - protein, 3 aa, Artificial Sequence
  Synthetic construct
RNN

SEQ ID NO: 24960 - protein, 3 aa, Artificial Sequence
  Synthetic construct
YDS

SEQ ID NO: 24961 - protein, 3 aa, Artificial Sequence
  Synthetic construct
DAS

SEQ ID NO: 24962 - protein, 3 aa, Artificial Sequence
  Synthetic construct
AAS

SEQ ID NO: 24963 - protein, 3 aa, Artificial Sequence
  Synthetic construct
WAS

SEQ ID NO: 24964 - protein, 3 aa, Artificial Sequence
  Synthetic construct
AAS

SEQ ID NO: 24965 - protein, 3 aa, Artificial Sequence
  Synthetic construct
AAS

SEQ ID NO: 24966 - protein, 3 aa, Artificial Sequence
  Synthetic construct
YDT

SEQ ID NO: 24967 - protein, 3 aa, Artificial Sequence
  Synthetic construct
KAS

SEQ ID NO: 24968 - protein, 3 aa, Artificial Sequence
  Synthetic construct
AAS

SEQ ID NO: 24969 - protein, 3 aa, Artificial Sequence
  Synthetic construct
YDT

SEQ ID NO: 24970 - protein, 3 aa, Artificial Sequence
  Synthetic construct
AAS

SEQ ID NO: 24971 - protein, 3 aa, Artificial Sequence
  Synthetic construct
QDN

SEQ ID NO: 24972 - protein, 3 aa, Artificial Sequence
  Synthetic construct
AAS

SEQ ID NO: 24973 - protein, 3 aa, Artificial Sequence
  Synthetic construct
AAS

SEQ ID NO: 24974 - protein, 3 aa, Artificial Sequence
  Synthetic construct
AAS

SEQ ID NO: 24975 - protein, 3 aa, Artificial Sequence
  Synthetic construct
DTS

SEQ ID NO: 24976 - protein, 3 aa, Artificial Sequence
  Synthetic construct
GAS

SEQ ID NO: 24977 - protein, 3 aa, Artificial Sequence
  Synthetic construct
DVT

SEQ ID NO: 24978 - protein, 3 aa, Artificial Sequence
  Synthetic construct
AAS

SEQ ID NO: 24979 - protein, 3 aa, Artificial Sequence
  Synthetic construct
WAS

SEQ ID NO: 24980 - protein, 3 aa, Artificial Sequence
  Synthetic construct
EGS

SEQ ID NO: 24981 - protein, 3 aa, Artificial Sequence
  Synthetic construct
DAS

SEQ ID NO: 24982 - protein, 3 aa, Artificial Sequence
  Synthetic construct
DAS

SEQ ID NO: 24983 - protein, 3 aa, Artificial Sequence
  Synthetic construct
GAS

SEQ ID NO: 24984 - protein, 3 aa, Artificial Sequence
  Synthetic construct
DVT

SEQ ID NO: 24985 - protein, 3 aa, Artificial Sequence
  Synthetic construct
YDS

SEQ ID NO: 24986 - protein, 3 aa, Artificial Sequence
  Synthetic construct
YAS

SEQ ID NO: 24987 - protein, 3 aa, Artificial Sequence
  Synthetic construct
AAS

SEQ ID NO: 24988 - protein, 3 aa, Artificial Sequence
  Synthetic construct
QDT

SEQ ID NO: 24989 - protein, 3 aa, Artificial Sequence
  Synthetic construct
GVS

SEQ ID NO: 24990 - protein, 3 aa, Artificial Sequence
  Synthetic construct
KDN

SEQ ID NO: 24991 - protein, 3 aa, Artificial Sequence
  Synthetic construct
GAS

SEQ ID NO: 24992 - protein, 3 aa, Artificial Sequence
  Synthetic construct
DTS

SEQ ID NO: 24993 - protein, 3 aa, Artificial Sequence
  Synthetic construct
GAS

SEQ ID NO: 24994 - protein, 3 aa, Artificial Sequence
  Synthetic construct
DAS

SEQ ID NO: 24995 - protein, 3 aa, Artificial Sequence
  Synthetic construct
EGS

SEQ ID NO: 24996 - protein, 3 aa, Artificial Sequence
  Synthetic construct
QDN

SEQ ID NO: 24997 - protein, 3 aa, Artificial Sequence
  Synthetic construct
GAS

SEQ ID NO: 24998 - protein, 3 aa, Artificial Sequence
  Synthetic construct
EVS

SEQ ID NO: 24999 - protein, 3 aa, Artificial Sequence
  Synthetic construct
EVS

SEQ ID NO: 25000 - protein, 3 aa, Artificial Sequence
  Synthetic construct
AAS

SEQ ID NO: 25001 - protein, 3 aa, Artificial Sequence
  Synthetic construct
EGS

SEQ ID NO: 25002 - protein, 3 aa, Artificial Sequence
  Synthetic construct
GNS

SEQ ID NO: 25003 - protein, 3 aa, Artificial Sequence
  Synthetic construct
DAS

SEQ ID NO: 25004 - protein, 3 aa, Artificial Sequence
  Synthetic construct
AAS

SEQ ID NO: 25005 - protein, 3 aa, Artificial Sequence
  Synthetic construct
GAS

SEQ ID NO: 25006 - protein, 3 aa, Artificial Sequence
  Synthetic construct
YDG

SEQ ID NO: 25007 - protein, 3 aa, Artificial Sequence
  Synthetic construct
AAS

SEQ ID NO: 25008 - protein, 3 aa, Artificial Sequence
  Synthetic construct
GAS

SEQ ID NO: 25009 - protein, 3 aa, Artificial Sequence
  Synthetic construct
AAS

SEQ ID NO: 25010 - protein, 3 aa, Artificial Sequence
  Synthetic construct
YDS

SEQ ID NO: 25011 - protein, 3 aa, Artificial Sequence
  Synthetic construct
ANS

SEQ ID NO: 25012 - protein, 3 aa, Artificial Sequence
  Synthetic construct
AAS

SEQ ID NO: 25013 - protein, 3 aa, Artificial Sequence
  Synthetic construct
DVS

SEQ ID NO: 25014 - protein, 3 aa, Artificial Sequence
  Synthetic construct
GAS

SEQ ID NO: 25015 - protein, 3 aa, Artificial Sequence
  Synthetic construct
AAS

SEQ ID NO: 25016 - protein, 3 aa, Artificial Sequence
  Synthetic construct
GAS

SEQ ID NO: 25017 - protein, 3 aa, Artificial Sequence
  Synthetic construct
YDS

SEQ ID NO: 25018 - protein, 3 aa, Artificial Sequence
  Synthetic construct
EDS

SEQ ID NO: 25019 - protein, 3 aa, Artificial Sequence
  Synthetic construct
GNS

SEQ ID NO: 25020 - protein, 3 aa, Artificial Sequence
  Synthetic construct
GAS

SEQ ID NO: 25021 - protein, 3 aa, Artificial Sequence
  Synthetic construct
GAS

SEQ ID NO: 25022 - protein, 3 aa, Artificial Sequence
  Synthetic construct
GNT

SEQ ID NO: 25023 - protein, 3 aa, Artificial Sequence
  Synthetic construct
SNS

SEQ ID NO: 25024 - protein, 3 aa, Artificial Sequence
  Synthetic construct
GAS

SEQ ID NO: 25025 - protein, 3 aa, Artificial Sequence
  Synthetic construct
YAS

SEQ ID NO: 25026 - protein, 3 aa, Artificial Sequence
  Synthetic construct
WAS

SEQ ID NO: 25027 - protein, 7 aa, Artificial Sequence
  Synthetic construct
YKSDSDK

SEQ ID NO: 25028 - protein, 3 aa, Artificial Sequence
  Synthetic construct
GAS

SEQ ID NO: 25029 - protein, 3 aa, Artificial Sequence
  Synthetic construct
SNN

SEQ ID NO: 25030 - protein, 3 aa, Artificial Sequence
  Synthetic construct
DNN

SEQ ID NO: 25031 - protein, 3 aa, Artificial Sequence
  Synthetic construct
GKN

SEQ ID NO: 25032 - protein, 3 aa, Artificial Sequence
  Synthetic construct
SAS

SEQ ID NO: 25033 - protein, 3 aa, Artificial Sequence
  Synthetic construct
AAS

SEQ ID NO: 25034 - protein, 3 aa, Artificial Sequence
  Synthetic construct
GAS

SEQ ID NO: 25035 - protein, 3 aa, Artificial Sequence
  Synthetic construct
EGS

SEQ ID NO: 25036 - protein, 3 aa, Artificial Sequence
  Synthetic construct
SDN

SEQ ID NO: 25037 - protein, 3 aa, Artificial Sequence
  Synthetic construct
LGS

SEQ ID NO: 25038 - protein, 7 aa, Artificial Sequence
  Synthetic construct
YKSDSDK

SEQ ID NO: 25039 - protein, 3 aa, Artificial Sequence
  Synthetic construct
KAS

SEQ ID NO: 25040 - protein, 3 aa, Artificial Sequence
  Synthetic construct
ENN

SEQ ID NO: 25041 - protein, 3 aa, Artificial Sequence
  Synthetic construct
DVS

SEQ ID NO: 25042 - protein, 3 aa, Artificial Sequence
  Synthetic construct
KDS

SEQ ID NO: 25043 - protein, 3 aa, Artificial Sequence
  Synthetic construct
WAS

SEQ ID NO: 25044 - protein, 3 aa, Artificial Sequence
  Synthetic construct
GAS

SEQ ID NO: 25045 - protein, 3 aa, Artificial Sequence
  Synthetic construct
EGS

SEQ ID NO: 25046 - protein, 3 aa, Artificial Sequence
  Synthetic construct
SVS

SEQ ID NO: 25047 - protein, 3 aa, Artificial Sequence
  Synthetic construct
GGS

SEQ ID NO: 25048 - protein, 3 aa, Artificial Sequence
  Synthetic construct
GSS

SEQ ID NO: 25049 - protein, 3 aa, Artificial Sequence
  Synthetic construct
RND

SEQ ID NO: 25050 - protein, 3 aa, Artificial Sequence
  Synthetic construct
AAS

SEQ ID NO: 25051 - protein, 3 aa, Artificial Sequence
  Synthetic construct
KAS

SEQ ID NO: 25052 - protein, 3 aa, Artificial Sequence
  Synthetic construct
YAS

SEQ ID NO: 25053 - protein, 3 aa, Artificial Sequence
  Synthetic construct
RGS

SEQ ID NO: 25054 - protein, 3 aa, Artificial Sequence
  Synthetic construct
GAS

SEQ ID NO: 25055 - protein, 3 aa, Artificial Sequence
  Synthetic construct
AAS

SEQ ID NO: 25056 - protein, 3 aa, Artificial Sequence
  Synthetic construct
WAS

SEQ ID NO: 25057 - protein, 3 aa, Artificial Sequence
  Synthetic construct
KDS

SEQ ID NO: 25058 - protein, 3 aa, Artificial Sequence
  Synthetic construct
KDI

SEQ ID NO: 25059 - protein, 3 aa, Artificial Sequence
  Synthetic construct
DVN

SEQ ID NO: 25060 - protein, 3 aa, Artificial Sequence
  Synthetic construct
GAS

SEQ ID NO: 25061 - protein, 3 aa, Artificial Sequence
  Synthetic construct
GAF

SEQ ID NO: 25062 - protein, 3 aa, Artificial Sequence
  Synthetic construct
GTS

SEQ ID NO: 25063 - protein, 3 aa, Artificial Sequence
  Synthetic construct
LGS

SEQ ID NO: 25064 - protein, 3 aa, Artificial Sequence
  Synthetic construct
KDS

SEQ ID NO: 25065 - protein, 3 aa, Artificial Sequence
  Synthetic construct
ENN

SEQ ID NO: 25066 - protein, 3 aa, Artificial Sequence
  Synthetic construct
VAS

SEQ ID NO: 25067 - protein, 3 aa, Artificial Sequence
  Synthetic construct
LGS

SEQ ID NO: 25068 - protein, 3 aa, Artificial Sequence
  Synthetic construct
AAS

SEQ ID NO: 25069 - protein, 3 aa, Artificial Sequence
  Synthetic construct
DAS

SEQ ID NO: 25070 - protein, 3 aa, Artificial Sequence
  Synthetic construct
DAS

SEQ ID NO: 25071 - protein, 3 aa, Artificial Sequence
  Synthetic construct
END

SEQ ID NO: 25072 - protein, 3 aa, Artificial Sequence
  Synthetic construct
QDT

SEQ ID NO: 25073 - protein, 3 aa, Artificial Sequence
  Synthetic construct
EVS

SEQ ID NO: 25074 - protein, 3 aa, Artificial Sequence
  Synthetic construct
DVV

SEQ ID NO: 25075 - protein, 3 aa, Artificial Sequence
  Synthetic construct
AAS

SEQ ID NO: 25076 - protein, 3 aa, Artificial Sequence
  Synthetic construct
LGS

SEQ ID NO: 25077 - protein, 3 aa, Artificial Sequence
  Synthetic construct
AAS

SEQ ID NO: 25078 - protein, 3 aa, Artificial Sequence
  Synthetic construct
DAS

SEQ ID NO: 25079 - protein, 3 aa, Artificial Sequence
  Synthetic construct
DVS

SEQ ID NO: 25080 - protein, 3 aa, Artificial Sequence
  Synthetic construct
YDT

SEQ ID NO: 25081 - protein, 3 aa, Artificial Sequence
  Synthetic construct
AAS

SEQ ID NO: 25082 - protein, 3 aa, Artificial Sequence
  Synthetic construct
LGS

SEQ ID NO: 25083 - protein, 3 aa, Artificial Sequence
  Synthetic construct
DAS

SEQ ID NO: 25084 - protein, 3 aa, Artificial Sequence
  Synthetic construct
DVT

SEQ ID NO: 25085 - protein, 3 aa, Artificial Sequence
  Synthetic construct
DAS

SEQ ID NO: 25086 - protein, 3 aa, Artificial Sequence
  Synthetic construct
DAS

SEQ ID NO: 25087 - protein, 3 aa, Artificial Sequence
  Synthetic construct
DVS

SEQ ID NO: 25088 - protein, 3 aa, Artificial Sequence
  Synthetic construct
GNT

SEQ ID NO: 25089 - protein, 3 aa, Artificial Sequence
  Synthetic construct
AAA

SEQ ID NO: 25090 - protein, 3 aa, Artificial Sequence
  Synthetic construct
HVN

SEQ ID NO: 25091 - protein, 3 aa, Artificial Sequence
  Synthetic construct
QDT

SEQ ID NO: 25092 - protein, 3 aa, Artificial Sequence
  Synthetic construct
DAS

SEQ ID NO: 25093 - protein, 3 aa, Artificial Sequence
  Synthetic construct
AAS

SEQ ID NO: 25094 - protein, 3 aa, Artificial Sequence
  Synthetic construct
DVT

SEQ ID NO: 25095 - protein, 3 aa, Artificial Sequence
  Synthetic construct
DAS

SEQ ID NO: 25096 - protein, 3 aa, Artificial Sequence
  Synthetic construct
AAS

SEQ ID NO: 25097 - protein, 3 aa, Artificial Sequence
  Synthetic construct
SNN

SEQ ID NO: 25098 - protein, 3 aa, Artificial Sequence
  Synthetic construct
AAS

SEQ ID NO: 25099 - protein, 3 aa, Artificial Sequence
  Synthetic construct
AAS

SEQ ID NO: 25100 - protein, 3 aa, Artificial Sequence
  Synthetic construct
AAS

SEQ ID NO: 25101 - protein, 3 aa, Artificial Sequence
  Synthetic construct
EDS

SEQ ID NO: 25102 - protein, 3 aa, Artificial Sequence
  Synthetic construct
ELS

SEQ ID NO: 25103 - protein, 3 aa, Artificial Sequence
  Synthetic construct
GAS

SEQ ID NO: 25104 - protein, 3 aa, Artificial Sequence
  Synthetic construct
GAS

SEQ ID NO: 25105 - protein, 3 aa, Artificial Sequence
  Synthetic construct
EDS

SEQ ID NO: 25106 - protein, 3 aa, Artificial Sequence
  Synthetic construct
DAS

SEQ ID NO: 25107 - protein, 3 aa, Artificial Sequence
  Synthetic construct
SNN

SEQ ID NO: 25108 - protein, 3 aa, Artificial Sequence
  Synthetic construct
GAS

SEQ ID NO: 25109 - protein, 3 aa, Artificial Sequence
  Synthetic construct
YDS

SEQ ID NO: 25110 - protein, 3 aa, Artificial Sequence
  Synthetic construct
GEN

SEQ ID NO: 25111 - protein, 3 aa, Artificial Sequence
  Synthetic construct
GAS

SEQ ID NO: 25112 - protein, 3 aa, Artificial Sequence
  Synthetic construct
KAS

SEQ ID NO: 25113 - protein, 3 aa, Artificial Sequence
  Synthetic construct
EDS

SEQ ID NO: 25114 - protein, 3 aa, Artificial Sequence
  Synthetic construct
TAS

SEQ ID NO: 25115 - protein, 3 aa, Artificial Sequence
  Synthetic construct
DAS

SEQ ID NO: 25116 - protein, 3 aa, Artificial Sequence
  Synthetic construct
GAS

SEQ ID NO: 25117 - protein, 3 aa, Artificial Sequence
  Synthetic construct
YAS

SEQ ID NO: 25118 - protein, 3 aa, Artificial Sequence
  Synthetic construct
EDN

SEQ ID NO: 25119 - protein, 3 aa, Artificial Sequence
  Synthetic construct
EVS

SEQ ID NO: 25120 - protein, 3 aa, Artificial Sequence
  Synthetic construct
EDS

SEQ ID NO: 25121 - protein, 3 aa, Artificial Sequence
  Synthetic construct
WAS

SEQ ID NO: 25122 - protein, 3 aa, Artificial Sequence
  Synthetic construct
LGS

SEQ ID NO: 25123 - protein, 3 aa, Artificial Sequence
  Synthetic construct
DAS

SEQ ID NO: 25124 - protein, 3 aa, Artificial Sequence
  Synthetic construct
EGN

SEQ ID NO: 25125 - protein, 3 aa, Artificial Sequence
  Synthetic construct
YAS

SEQ ID NO: 25126 - protein, 3 aa, Artificial Sequence
  Synthetic construct
DVS

SEQ ID NO: 25127 - protein, 3 aa, Artificial Sequence
  Synthetic construct
YDG

SEQ ID NO: 25128 - protein, 3 aa, Artificial Sequence
  Synthetic construct
YDT

SEQ ID NO: 25129 - protein, 3 aa, Artificial Sequence
  Synthetic construct
DAS

SEQ ID NO: 25130 - protein, 3 aa, Artificial Sequence
  Synthetic construct
RDS

SEQ ID NO: 25131 - protein, 3 aa, Artificial Sequence
  Synthetic construct
GAS

SEQ ID NO: 25132 - protein, 3 aa, Artificial Sequence
  Synthetic construct
YDT

SEQ ID NO: 25133 - protein, 3 aa, Artificial Sequence
  Synthetic construct
KAS

SEQ ID NO: 25134 - protein, 3 aa, Artificial Sequence
  Synthetic construct
KDN

SEQ ID NO: 25135 - protein, 3 aa, Artificial Sequence
  Synthetic construct
EVS

SEQ ID NO: 25136 - protein, 3 aa, Artificial Sequence
  Synthetic construct
DAS

SEQ ID NO: 25137 - protein, 3 aa, Artificial Sequence
  Synthetic construct
DAS

SEQ ID NO: 25138 - protein, 3 aa, Artificial Sequence
  Synthetic construct
EDS

SEQ ID NO: 25139 - protein, 3 aa, Artificial Sequence
  Synthetic construct
AAS

SEQ ID NO: 25140 - protein, 3 aa, Artificial Sequence
  Synthetic construct
RNN

SEQ ID NO: 25141 - protein, 3 aa, Artificial Sequence
  Synthetic construct
DAS

SEQ ID NO: 25142 - protein, 3 aa, Artificial Sequence
  Synthetic construct
DTS

SEQ ID NO: 25143 - protein, 3 aa, Artificial Sequence
  Synthetic construct
DDS

SEQ ID NO: 25144 - protein, 3 aa, Artificial Sequence
  Synthetic construct
AAS

SEQ ID NO: 25145 - protein, 3 aa, Artificial Sequence
  Synthetic construct
DVS

SEQ ID NO: 25146 - protein, 3 aa, Artificial Sequence
  Synthetic construct
EVF

SEQ ID NO: 25147 - protein, 3 aa, Artificial Sequence
  Synthetic construct
DAS

SEQ ID NO: 25148 - protein, 3 aa, Artificial Sequence
  Synthetic construct
WAS

SEQ ID NO: 25149 - protein, 3 aa, Artificial Sequence
  Synthetic construct
LGS

SEQ ID NO: 25150 - protein, 3 aa, Artificial Sequence
  Synthetic construct
GAS

SEQ ID NO: 25151 - protein, 3 aa, Artificial Sequence
  Synthetic construct
EVS

SEQ ID NO: 25152 - protein, 3 aa, Artificial Sequence
  Synthetic construct
GNS

SEQ ID NO: 25153 - protein, 3 aa, Artificial Sequence
  Synthetic construct
WAS

SEQ ID NO: 25154 - protein, 3 aa, Artificial Sequence
  Synthetic construct
KAS

SEQ ID NO: 25155 - protein, 3 aa, Artificial Sequence
  Synthetic construct
RNN

SEQ ID NO: 25156 - protein, 3 aa, Artificial Sequence
  Synthetic construct
DVN

SEQ ID NO: 25157 - protein, 3 aa, Artificial Sequence
  Synthetic construct
AAS

SEQ ID NO: 25158 - protein, 3 aa, Artificial Sequence
  Synthetic construct
DVN

SEQ ID NO: 25159 - protein, 3 aa, Artificial Sequence
  Synthetic construct
AAS

SEQ ID NO: 25160 - protein, 3 aa, Artificial Sequence
  Synthetic construct
GAS

SEQ ID NO: 25161 - protein, 3 aa, Artificial Sequence
  Synthetic construct
GAS

SEQ ID NO: 25162 - protein, 3 aa, Artificial Sequence
  Synthetic construct
EDS

SEQ ID NO: 25163 - protein, 3 aa, Artificial Sequence
  Synthetic construct
GNN

SEQ ID NO: 25164 - protein, 3 aa, Artificial Sequence
  Synthetic construct
STS

SEQ ID NO: 25165 - protein, 3 aa, Artificial Sequence
  Synthetic construct
YDS

SEQ ID NO: 25166 - protein, 3 aa, Artificial Sequence
  Synthetic construct
LVD

SEQ ID NO: 25167 - protein, 3 aa, Artificial Sequence
  Synthetic construct
GAS

SEQ ID NO: 25168 - protein, 3 aa, Artificial Sequence
  Synthetic construct
AAS

SEQ ID NO: 25169 - protein, 3 aa, Artificial Sequence
  Synthetic construct
LGS

SEQ ID NO: 25170 - protein, 3 aa, Artificial Sequence
  Synthetic construct
EAT

SEQ ID NO: 25171 - protein, 3 aa, Artificial Sequence
  Synthetic construct
WAS

SEQ ID NO: 25172 - protein, 3 aa, Artificial Sequence
  Synthetic construct
AAS

SEQ ID NO: 25173 - protein, 3 aa, Artificial Sequence
  Synthetic construct
RNN

SEQ ID NO: 25174 - protein, 3 aa, Artificial Sequence
  Synthetic construct
GNS

SEQ ID NO: 25175 - protein, 3 aa, Artificial Sequence
  Synthetic construct
DAS

SEQ ID NO: 25176 - protein, 3 aa, Artificial Sequence
  Synthetic construct
AAS

SEQ ID NO: 25177 - protein, 3 aa, Artificial Sequence
  Synthetic construct
SDD

SEQ ID NO: 25178 - protein, 3 aa, Artificial Sequence
  Synthetic construct
KDI

SEQ ID NO: 25179 - protein, 3 aa, Artificial Sequence
  Synthetic construct
DAS

SEQ ID NO: 25180 - protein, 7 aa, Artificial Sequence
  Synthetic construct
YKSDSDK

SEQ ID NO: 25181 - protein, 3 aa, Artificial Sequence
  Synthetic construct
GAS

SEQ ID NO: 25182 - protein, 3 aa, Artificial Sequence
  Synthetic construct
YAS

SEQ ID NO: 25183 - protein, 3 aa, Artificial Sequence
  Synthetic construct
EVS

SEQ ID NO: 25184 - protein, 11 aa, Artificial Sequence
  Synthetic construct
QSADSSGTYPG

SEQ ID NO: 25185 - protein, 9 aa, Artificial Sequence
  Synthetic construct
QQYNNWPLT

SEQ ID NO: 25186 - protein, 9 aa, Artificial Sequence
  Synthetic construct
QAWGSSTAV

SEQ ID NO: 25187 - protein, 11 aa, Artificial Sequence
  Synthetic construct
CSYAGSSTYWV

SEQ ID NO: 25188 - protein, 10 aa, Artificial Sequence
  Synthetic construct
QAWDISTGGV

SEQ ID NO: 25189 - protein, 10 aa, Artificial Sequence
  Synthetic construct
QRRSNWPPYT

SEQ ID NO: 25190 - protein, 11 aa, Artificial Sequence
  Synthetic construct
GTWDSSLSAGV

SEQ ID NO: 25191 - protein, 10 aa, Artificial Sequence
  Synthetic construct
SSYTGSSTYV

SEQ ID NO: 25192 - protein, 10 aa, Artificial Sequence
  Synthetic construct
SSYTSSSTLV

SEQ ID NO: 25193 - protein, 12 aa, Artificial Sequence
  Synthetic construct
QVWDGSNDPPYV

SEQ ID NO: 25194 - protein, 9 aa, Artificial Sequence
  Synthetic construct
MQSIQLPYT

SEQ ID NO: 25195 - protein, 11 aa, Artificial Sequence
  Synthetic construct
QQRSNWPPRYT

SEQ ID NO: 25196 - protein, 8 aa, Artificial Sequence
  Synthetic construct
QQYNSYST

SEQ ID NO: 25197 - protein, 9 aa, Artificial Sequence
  Synthetic construct
QQSYSTPPT

SEQ ID NO: 25198 - protein, 11 aa, Artificial Sequence
  Synthetic construct
HQRSNWPPIFT

SEQ ID NO: 25199 - protein, 9 aa, Artificial Sequence
  Synthetic construct
QQRSNWPWT

SEQ ID NO: 25200 - protein, 8 aa, Artificial Sequence
  Synthetic construct
CSYATTWV

SEQ ID NO: 25201 - protein, 8 aa, Artificial Sequence
  Synthetic construct
QQANGFPL

SEQ ID NO: 25202 - protein, 9 aa, Artificial Sequence
  Synthetic construct
QQYDNVPFT

SEQ ID NO: 25203 - protein, 10 aa, Artificial Sequence
  Synthetic construct
CSYAGFSTYV

SEQ ID NO: 25204 - protein, 9 aa, Artificial Sequence
  Synthetic construct
QQYYNTPPT

SEQ ID NO: 25205 - protein, 9 aa, Artificial Sequence
  Synthetic construct
YSTDSSEGV

SEQ ID NO: 25206 - protein, 9 aa, Artificial Sequence
  Synthetic construct
QQLKSYPRT

SEQ ID NO: 25207 - protein, 9 aa, Artificial Sequence
  Synthetic construct
QQYGSSPRT

SEQ ID NO: 25208 - protein, 11 aa, Artificial Sequence
  Synthetic construct
AAWDDSLSGEV

SEQ ID NO: 25209 - protein, 9 aa, Artificial Sequence
  Synthetic construct
LLFYGGAWV

SEQ ID NO: 25210 - protein, 11 aa, Artificial Sequence
  Synthetic construct
QSFDTSLSVYV

SEQ ID NO: 25211 - protein, 12 aa, Artificial Sequence
  Synthetic construct
NSHAGTNTPHVI

SEQ ID NO: 25212 - protein, 10 aa, Artificial Sequence
  Synthetic construct
QQYTYWPPLT

SEQ ID NO: 25213 - protein, 9 aa, Artificial Sequence
  Synthetic construct
QQSYSPPFT

SEQ ID NO: 25214 - protein, 10 aa, Artificial Sequence
  Synthetic construct
SSYTSSSTYV

SEQ ID NO: 25215 - protein, 9 aa, Artificial Sequence
  Synthetic construct
LQYNSYPIT

SEQ ID NO: 25216 - protein, 12 aa, Artificial Sequence
  Synthetic construct
GTWDSSLSVGGV

SEQ ID NO: 25217 - protein, 9 aa, Artificial Sequence
  Synthetic construct
QQYNSYPFT

SEQ ID NO: 25218 - protein, 10 aa, Artificial Sequence
  Synthetic construct
AAWDDSLNGV

SEQ ID NO: 25219 - protein, 9 aa, Artificial Sequence
  Synthetic construct
QKYYRVPLT

SEQ ID NO: 25220 - protein, 10 aa, Artificial Sequence
  Synthetic construct
QQYGSSPPYT

SEQ ID NO: 25221 - protein, 12 aa, Artificial Sequence
  Synthetic construct
YSTDSSSNPNYV

SEQ ID NO: 25222 - protein, 11 aa, Artificial Sequence
  Synthetic construct
ATWDDSLDGPV

SEQ ID NO: 25223 - protein, 10 aa, Artificial Sequence
  Synthetic construct
YSTDSSGKGV

SEQ ID NO: 25224 - protein, 9 aa, Artificial Sequence
  Synthetic construct
QQSYSISWT

SEQ ID NO: 25225 - protein, 9 aa, Artificial Sequence
  Synthetic construct
QQYNNYLYT

SEQ ID NO: 25226 - protein, 10 aa, Artificial Sequence
  Synthetic construct
QQLNSYPEIT

SEQ ID NO: 25227 - protein, 9 aa, Artificial Sequence
  Synthetic construct
HLHGGLPRT

SEQ ID NO: 25228 - protein, 10 aa, Artificial Sequence
  Synthetic construct
FSYTSRGTRV

SEQ ID NO: 25229 - protein, 8 aa, Artificial Sequence
  Synthetic construct
CSYAHTWV

SEQ ID NO: 25230 - protein, 6 aa, Artificial Sequence
  Synthetic construct
QQYGSI

SEQ ID NO: 25231 - protein, 9 aa, Artificial Sequence
  Synthetic construct
QQRRNWPQT

SEQ ID NO: 25232 - protein, 11 aa, Artificial Sequence
  Synthetic construct
GTWDSSLSAVV

SEQ ID NO: 25233 - protein, 9 aa, Artificial Sequence
  Synthetic construct
MQALQTPRT

SEQ ID NO: 25234 - protein, 9 aa, Artificial Sequence
  Synthetic construct
QQYGNSRLT

SEQ ID NO: 25235 - protein, 9 aa, Artificial Sequence
  Synthetic construct
MQSIQLPLT

SEQ ID NO: 25236 - protein, 10 aa, Artificial Sequence
  Synthetic construct
SSYAGSNNLV

SEQ ID NO: 25237 - protein, 11 aa, Artificial Sequence
  Synthetic construct
QSADSSGPYWV

SEQ ID NO: 25238 - protein, 11 aa, Artificial Sequence
  Synthetic construct
QSVDSSGTYWV

SEQ ID NO: 25239 - protein, 10 aa, Artificial Sequence
  Synthetic construct
SSFTSSSTVV

SEQ ID NO: 25240 - protein, 8 aa, Artificial Sequence
  Synthetic construct
CSYAGSVL

SEQ ID NO: 25241 - protein, 11 aa, Artificial Sequence
  Synthetic construct
QSYDFSLRGWV

SEQ ID NO: 25242 - protein, 9 aa, Artificial Sequence
  Synthetic construct
MQSIQLPYT

SEQ ID NO: 25243 - protein, 11 aa, Artificial Sequence
  Synthetic construct
GTWDSSLSAGV

SEQ ID NO: 25244 - protein, 8 aa, Artificial Sequence
  Synthetic construct
CSYAHTWV

SEQ ID NO: 25245 - protein, 12 aa, Artificial Sequence
  Synthetic construct
QSYDSNLSVPYV

SEQ ID NO: 25246 - protein, 11 aa, Artificial Sequence
  Synthetic construct
QSAASSGTWVV

SEQ ID NO: 25247 - protein, 9 aa, Artificial Sequence
  Synthetic construct
MQALQTPWT

SEQ ID NO: 25248 - protein, 11 aa, Artificial Sequence
  Synthetic construct
QQRTSRPPTWT

SEQ ID NO: 25249 - protein, 11 aa, Artificial Sequence
  Synthetic construct
HSTDGSGNLWV

SEQ ID NO: 25250 - protein, 9 aa, Artificial Sequence
  Synthetic construct
QQYGSSPYT

SEQ ID NO: 25251 - protein, 10 aa, Artificial Sequence
  Synthetic construct
QQRSDWPPFT

SEQ ID NO: 25252 - protein, 9 aa, Artificial Sequence
  Synthetic construct
QQSYITLRT

SEQ ID NO: 25253 - protein, 9 aa, Artificial Sequence
  Synthetic construct
QQYGSSPRT

SEQ ID NO: 25254 - protein, 10 aa, Artificial Sequence [sequence omitted]

SEQ ID NO: 25255 - protein, 9 aa, Artificial Sequence
  Synthetic construct
QQHYSLPRT

SEQ ID NO: 25256 - protein, 9 aa, Artificial Sequence
  Synthetic construct
QQYGSLFLT

SEQ ID NO: 25257 - protein, 8 aa, Artificial Sequence
  Synthetic construct
QVWDSSVV

SEQ ID NO: 25258 - protein, 10 aa, Artificial Sequence
  Synthetic construct
SSYAGSNNLV

SEQ ID NO: 25259 - protein, 11 aa, Artificial Sequence
  Synthetic construct
AAWDDSLSAWV

SEQ ID NO: 25260 - protein, 10 aa, Artificial Sequence
  Synthetic construct
QQYYSTPPWT

SEQ ID NO: 25261 - protein, 10 aa, Artificial Sequence
  Synthetic construct
QQRGNWPPFT

SEQ ID NO: 25262 - protein, 10 aa, Artificial Sequence
  Synthetic construct
NSYTSSSTYV

SEQ ID NO: 25263 - protein, 10 aa, Artificial Sequence
  Synthetic construct
QQYGSSPLFT

SEQ ID NO: 25264 - protein, 9 aa, Artificial Sequence
  Synthetic construct
QQANSFPYT

SEQ ID NO: 25265 - protein, 10 aa, Artificial Sequence
  Synthetic construct
QQRSNWPPFT

SEQ ID NO: 25266 - protein, 10 aa, Artificial Sequence
  Synthetic construct
YSTDSSGKGV

SEQ ID NO: 25267 - protein, 10 aa, Artificial Sequence
  Synthetic construct
SSYAGSNPVI

SEQ ID NO: 25268 - protein, 10 aa, Artificial Sequence
  Synthetic construct
SSYTSSATRV

SEQ ID NO: 25269 - protein, 4 aa, Artificial Sequence
  Synthetic construct
QQGT

SEQ ID NO: 25270 - protein, 10 aa, Artificial Sequence
  Synthetic construct
QQYATSPGYT

SEQ ID NO: 25271 - protein, 10 aa, Artificial Sequence
  Synthetic construct
QTWDTGVLRM

SEQ ID NO: 25272 - protein, 13 aa, Artificial Sequence
  Synthetic construct
SSYTSSITLGPYV

SEQ ID NO: 25273 - protein, 10 aa, Artificial Sequence
  Synthetic construct
HSTDNSGNPL

SEQ ID NO: 25274 - protein, 10 aa, Artificial Sequence
  Synthetic construct
SSYTSSSTVV

SEQ ID NO: 25275 - protein, 11 aa, Artificial Sequence
  Synthetic construct
GAWDSSLSVVV

SEQ ID NO: 25276 - protein, 10 aa, Artificial Sequence
  Synthetic construct
QQYDDWPLIT

SEQ ID NO: 25277 - protein, 11 aa, Artificial Sequence
  Synthetic construct
QQRSNWPPRVT

SEQ ID NO: 25278 - protein, 9 aa, Artificial Sequence
  Synthetic construct
QQLSGYPYT

SEQ ID NO: 25279 - protein, 9 aa, Artificial Sequence
  Synthetic construct
QQYGSSRLI

SEQ ID NO: 25280 - protein, 9 aa, Artificial Sequence
  Synthetic construct
YSTDNNGRV

SEQ ID NO: 25281 - protein, 11 aa, Artificial Sequence
  Synthetic construct
QQRANWPPRGT

SEQ ID NO: 25282 - protein, 11 aa, Artificial Sequence
  Synthetic construct
GTWDDSLSAWV

SEQ ID NO: 25283 - protein, 9 aa, Artificial Sequence
  Synthetic construct
QQYNNWPYT

SEQ ID NO: 25284 - protein, 8 aa, Artificial Sequence
  Synthetic construct
QVWDSSVV

SEQ ID NO: 25285 - protein, 9 aa, Artificial Sequence
  Synthetic construct
MQSIQLPYT

SEQ ID NO: 25286 - protein, 9 aa, Artificial Sequence
  Synthetic construct
QQYYSTPPT

SEQ ID NO: 25287 - protein, 11 aa, Artificial Sequence
  Synthetic construct
AAWDDSLSAWV

SEQ ID NO: 25288 - protein, 13 aa, Artificial Sequence
  Synthetic construct
GTWDSSLSAGNVL

SEQ ID NO: 25289 - protein, 9 aa, Artificial Sequence
  Synthetic construct
QQSFSTPYT

SEQ ID NO: 25290 - protein, 10 aa, Artificial Sequence
  Synthetic construct
CTYAGSSTYV

SEQ ID NO: 25291 - protein, 10 aa, Artificial Sequence
  Synthetic construct
HQYGYSLPNT

SEQ ID NO: 25292 - protein, 9 aa, Artificial Sequence
  Synthetic construct
QQYSRYSYS

SEQ ID NO: 25293 - protein, 10 aa, Artificial Sequence
  Synthetic construct
QQYGSSPPWT

SEQ ID NO: 25294 - protein, 8 aa, Artificial Sequence
  Synthetic construct
QHYDNLPR

SEQ ID NO: 25295 - protein, 11 aa, Artificial Sequence
  Synthetic construct
QQYNNWPPAKT

SEQ ID NO: 25296 - protein, 11 aa, Artificial Sequence
  Synthetic construct
GTWDSSLSAVV

SEQ ID NO: 25297 - protein, 9 aa, Artificial Sequence
  Synthetic construct
QQYGSSPYT

SEQ ID NO: 25298 - protein, 9 aa, Artificial Sequence
  Synthetic construct
QQYYNTPPT

SEQ ID NO: 25299 - protein, 9 aa, Artificial Sequence
  Synthetic construct
QQYDNWPQT

SEQ ID NO: 25300 - protein, 13 aa, Artificial Sequence
  Synthetic construct
ATWDESLSVAYVV

SEQ ID NO: 25301 - protein, 9 aa, Artificial Sequence
  Synthetic construct
QQYGSSPYT

SEQ ID NO: 25302 - protein, 9 aa, Artificial Sequence
  Synthetic construct
QQYYSPPFT

SEQ ID NO: 25303 - protein, 9 aa, Artificial Sequence
  Synthetic construct
QQYYNTPPT

SEQ ID NO: 25304 - protein, 8 aa, Artificial Sequence
  Synthetic construct
CSYVDAYL

SEQ ID NO: 25305 - protein, 8 aa, Artificial Sequence
  Synthetic construct
QVWDSGVV

SEQ ID NO: 25306 - protein, 8 aa, Artificial Sequence
  Synthetic construct
QQSGTSWT

SEQ ID NO: 25307 - protein, 11 aa, Artificial Sequence
  Synthetic construct
SSYTSSSTYVV

SEQ ID NO: 25308 - protein, 14 aa, Artificial Sequence
  Synthetic construct
YSYAGAGSGGSSWV

SEQ ID NO: 25309 - protein, 9 aa, Artificial Sequence
  Synthetic construct
QQTNSFPLT

SEQ ID NO: 25310 - protein, 10 aa, Artificial Sequence
  Synthetic construct
QRRSNWPPFT

SEQ ID NO: 25311 - protein, 10 aa, Artificial Sequence
  Synthetic construct
QSYDSSNRGV

SEQ ID NO: 25312 - protein, 9 aa, Artificial Sequence
  Synthetic construct
MQSIQLPRT

SEQ ID NO: 25313 - protein, 9 aa, Artificial Sequence
  Synthetic construct
QQLNSYPQT

SEQ ID NO: 25314 - protein, 9 aa, Artificial Sequence
  Synthetic construct
QQYTAAPRT

SEQ ID NO: 25315 - protein, 10 aa, Artificial Sequence
  Synthetic construct
QQRSNWPPFT

SEQ ID NO: 25316 - protein, 11 aa, Artificial Sequence
  Synthetic construct
AAWDDSLNGPV

SEQ ID NO: 25317 - protein, 11 aa, Artificial Sequence
  Synthetic construct
QHRRNWPPTYT

SEQ ID NO: 25318 - protein, 9 aa, Artificial Sequence
  Synthetic construct
QQTYSSPLT

SEQ ID NO: 25319 - protein, 11 aa, Artificial Sequence
  Synthetic construct
SSYTSSSSPWV

SEQ ID NO: 25320 - protein, 12 aa, Artificial Sequence
  Synthetic construct
YSTDNSDNHRRV

SEQ ID NO: 25321 - protein, 11 aa, Artificial Sequence
  Synthetic construct
AAWDDSLDGPV

SEQ ID NO: 25322 - protein, 9 aa, Artificial Sequence
  Synthetic construct
QQYGSSLFT

SEQ ID NO: 25323 - protein, 8 aa, Artificial Sequence
  Synthetic construct
MQVIQPYT

SEQ ID NO: 25324 - protein, 11 aa, Artificial Sequence
  Synthetic construct
QSYDSSLSGSV

SEQ ID NO: 25325 - protein, 9 aa, Artificial Sequence
  Synthetic construct
QAWDSSTAV

SEQ ID NO: 25326 - protein, 9 aa, Artificial Sequence
  Synthetic construct
QQSYSTPWT

SEQ ID NO: 25327 - protein, 11 aa, Artificial Sequence
  Synthetic construct
YSTDYTGNSGV

SEQ ID NO: 25328 - protein, 9 aa, Artificial Sequence
  Synthetic construct
SSYVGSNNL

SEQ ID NO: 25329 - protein, 12 aa, Artificial Sequence
  Synthetic construct
YSTDSSDNHKGV

SEQ ID NO: 25330 - protein, 9 aa, Artificial Sequence
  Synthetic construct
QQYNNWPLT

SEQ ID NO: 25331 - protein, 9 aa, Artificial Sequence
  Synthetic construct
LQYNSYPLT

SEQ ID NO: 25332 - protein, 10 aa, Artificial Sequence
  Synthetic construct
QQYTNWPPYT

SEQ ID NO: 25333 - protein, 9 aa, Artificial Sequence
  Synthetic construct
QQYYNSPRT

SEQ ID NO: 25334 - protein, 11 aa, Artificial Sequence
  Synthetic construct
YSTDSSGNLCV

SEQ ID NO: 25335 - protein, 5 aa, Artificial Sequence
  Synthetic construct
QQFLT

SEQ ID NO: 25336 - protein, 11 aa, Artificial Sequence
  Synthetic construct
GTWDRSLSAVV

SEQ ID NO: 25337 - protein, 8 aa, Artificial Sequence
  Synthetic construct
QQTSSNIT

SEQ ID NO: 25338 - protein, 8 aa, Artificial Sequence
  Synthetic construct
QQYGSSPF

SEQ ID NO: 25339 - protein, 9 aa, Artificial Sequence
  Synthetic construct
LQHNSYPLT

SEQ ID NO: 25340 - protein, 9 aa, Artificial Sequence
  Synthetic construct
QQSYSTPYT

SEQ ID NO: 25341 - protein, 11 aa, Artificial Sequence
  Synthetic construct
YSTDSSGYHRV

SEQ ID NO: 25342 - protein, 12 aa, Artificial Sequence
  Synthetic construct
SSYTSSSTLLYV

SEQ ID NO: 25343 - protein, 10 aa, Artificial Sequence
  Synthetic construct
QERSSWPQIT

SEQ ID NO: 25344 - protein, 8 aa, Artificial Sequence
  Synthetic construct
QRYGGSPL

SEQ ID NO: 25345 - protein, 11 aa, Artificial Sequence
  Synthetic construct
QSYDSSLIEGV

SEQ ID NO: 25346 - protein, 12 aa, Artificial Sequence
  Synthetic construct
QSYDSSLSGSSV

SEQ ID NO: 25347 - protein, 9 aa, Artificial Sequence
  Synthetic construct
QAWDSNTYV

SEQ ID NO: 25348 - protein, 9 aa, Artificial Sequence
  Synthetic construct
QQSYSTPVT

SEQ ID NO: 25349 - protein, 9 aa, Artificial Sequence
  Synthetic construct
QQYYRTPYT

SEQ ID NO: 25350 - protein, 10 aa, Artificial Sequence
  Synthetic construct
FSYTSRGTRV

SEQ ID NO: 25351 - protein, 9 aa, Artificial Sequence
  Synthetic construct
QQYNSYSYT

SEQ ID NO: 25352 - protein, 9 aa, Artificial Sequence
  Synthetic construct
QAWDSSTAV

SEQ ID NO: 25353 - protein, 9 aa, Artificial Sequence
  Synthetic construct
LLYYGDAWV

SEQ ID NO: 25354 - protein, 9 aa, Artificial Sequence
  Synthetic construct
QAWDSSNVV

SEQ ID NO: 25355 - protein, 9 aa, Artificial Sequence
  Synthetic construct
QQYGSSPWT

SEQ ID NO: 25356 - protein, 8 aa, Artificial Sequence
  Synthetic construct
QHYDNLPR

SEQ ID NO: 25357 - protein, 9 aa, Artificial Sequence
  Synthetic construct
LLYYGGPWV

SEQ ID NO: 25358 - protein, 9 aa, Artificial Sequence
  Synthetic construct
QQRSISALT

SEQ ID NO: 25359 - protein, 8 aa, Artificial Sequence
  Synthetic construct
MQALQTSG

SEQ ID NO: 25360 - protein, 11 aa, Artificial Sequence
  Synthetic construct
GTWDSSLSAWV

SEQ ID NO: 25361 - protein, 9 aa, Artificial Sequence
  Synthetic construct
QQYNNWLRT

SEQ ID NO: 25362 - protein, 11 aa, Artificial Sequence
  Synthetic construct
NSRDSSGDHLV

SEQ ID NO: 25363 - protein, 8 aa, Artificial Sequence
  Synthetic construct
QQYNNWWT

SEQ ID NO: 25364 - protein, 10 aa, Artificial Sequence
  Synthetic construct
SSYTSSSTQV

SEQ ID NO: 25365 - protein, 10 aa, Artificial Sequence
  Synthetic construct
QQYGSSPPYT

SEQ ID NO: 25366 - protein, 9 aa, Artificial Sequence
  Synthetic construct
SSYVGSNNL

SEQ ID NO: 25367 - protein, 9 aa, Artificial Sequence
  Synthetic construct
QQAHTFPPT

SEQ ID NO: 25368 - protein, 11 aa, Artificial Sequence
  Synthetic construct
QSYDSSLSGYV

SEQ ID NO: 25369 - protein, 9 aa, Artificial Sequence
  Synthetic construct
QQYYSPPRT

SEQ ID NO: 25370 - protein, 9 aa, Artificial Sequence
  Synthetic construct
QQYNSYPIT

SEQ ID NO: 25371 - protein, 11 aa, Artificial Sequence
  Synthetic construct
AVWDESLSGSV

SEQ ID NO: 25372 - protein, 10 aa, Artificial Sequence
  Synthetic construct
SSYTSTSTLV

SEQ ID NO: 25373 - protein, 9 aa, Artificial Sequence
  Synthetic construct
QQYGSSPFT

SEQ ID NO: 25374 - protein, 12 aa, Artificial Sequence
  Synthetic construct
QSFDSSLDGPVL

SEQ ID NO: 25375 - protein, 11 aa, Artificial Sequence
  Synthetic construct
TAWDDSVDGWV

SEQ ID NO: 25376 - protein, 9 aa, Artificial Sequence
  Synthetic construct
QQYGNSPWT

SEQ ID NO: 25377 - protein, 8 aa, Artificial Sequence
  Synthetic construct
QQGYSTPT

SEQ ID NO: 25378 - protein, 11 aa, Artificial Sequence
  Synthetic construct
AAWDDSLNGPV

SEQ ID NO: 25379 - protein, 9 aa, Artificial Sequence
  Synthetic construct
MQSIELPYT

SEQ ID NO: 25380 - protein, 10 aa, Artificial Sequence
  Synthetic construct
QQYNNWPLWT

SEQ ID NO: 25381 - protein, 12 aa, Artificial Sequence
  Synthetic construct
YSTDNTADPGGV

SEQ ID NO: 25382 - protein, 16 aa, Artificial Sequence
  Synthetic construct
SSYTTIITGVFGGGIV

SEQ ID NO: 25383 - protein, 8 aa, Artificial Sequence
  Synthetic construct
MQTIQPLT

SEQ ID NO: 25384 - protein, 9 aa, Artificial Sequence
  Synthetic construct
QQSYGTPLT

SEQ ID NO: 25385 - protein, 9 aa, Artificial Sequence
  Synthetic construct
MQATHFPLT

SEQ ID NO: 25386 - protein, 10 aa, Artificial Sequence
  Synthetic construct
CSYAGFSTWV

SEQ ID NO: 25387 - protein, 9 aa, Artificial Sequence
  Synthetic construct
QQYNTYPPT

SEQ ID NO: 25388 - protein, 12 aa, Artificial Sequence
  Synthetic construct
YSTDNSAYHRAV

SEQ ID NO: 25389 - protein, 9 aa, Artificial Sequence
  Synthetic construct
LQDYNYPLT

SEQ ID NO: 25390 - protein, 9 aa, Artificial Sequence
  Synthetic construct
QQLNSYPIT

SEQ ID NO: 25391 - protein, 11 aa, Artificial Sequence
  Synthetic construct
TSYTSSTPFYV

SEQ ID NO: 25392 - protein, 10 aa, Artificial Sequence
  Synthetic construct
LLSYSDTRRL

SEQ ID NO: 25393 - protein, 10 aa, Artificial Sequence
  Synthetic construct
SSYTSSSTLV

SEQ ID NO: 25394 - protein, 9 aa, Artificial Sequence
  Synthetic construct
QQYYSTSYT

SEQ ID NO: 25395 - protein, 10 aa, Artificial Sequence [sequence omitted]

SEQ ID NO: 25396 - protein, 9 aa, Artificial Sequence
  Synthetic construct
MQALQTPWT

SEQ ID NO: 25397 - protein, 8 aa, Artificial Sequence
  Synthetic construct
QQYNSFWT

SEQ ID NO: 25398 - protein, 10 aa, Artificial Sequence
  Synthetic construct
QQLNSYPALT

SEQ ID NO: 25399 - protein, 10 aa, Artificial Sequence
  Synthetic construct
SSFTSTSTLV

SEQ ID NO: 25400 - protein, 10 aa, Artificial Sequence
  Synthetic construct
SSYAGTNGYV

SEQ ID NO: 25401 - protein, 10 aa, Artificial Sequence
  Synthetic construct
SSYAGSNIMV

SEQ ID NO: 25402 - protein, 10 aa, Artificial Sequence
  Synthetic construct
QQRSNWPPFT

SEQ ID NO: 25403 - protein, 10 aa, Artificial Sequence
  Synthetic construct
QSADTIGTYV

SEQ ID NO: 25404 - protein, 12 aa, Artificial Sequence
  Synthetic construct
QSYDNSLSGPYV

SEQ ID NO: 25405 - protein, 10 aa, Artificial Sequence
  Synthetic construct
SSYTSRSTLV

SEQ ID NO: 25406 - protein, 11 aa, Artificial Sequence
  Synthetic construct
QQRSNWPPRST

SEQ ID NO: 25407 - protein, 8 aa, Artificial Sequence
  Synthetic construct
QQYYSAPT

SEQ ID NO: 25408 - protein, 8 aa, Artificial Sequence
  Synthetic construct
QAWDSSVV

SEQ ID NO: 25409 - protein, 8 aa, Artificial Sequence
  Synthetic construct
QHYDNLPR

SEQ ID NO: 25410 - protein, 9 aa, Artificial Sequence
  Synthetic construct
LQYNSYPIT

SEQ ID NO: 25411 - protein, 9 aa, Artificial Sequence
  Synthetic construct
QHYNNWHWT

SEQ ID NO: 25412 - protein, 11 aa, Artificial Sequence
  Synthetic construct
QSYDSSLSVYV

SEQ ID NO: 25413 - protein, 11 aa, Artificial Sequence
  Synthetic construct
QSADSGGPYWV

SEQ ID NO: 25414 - protein, 9 aa, Artificial Sequence
  Synthetic construct
QQYGSSPFT

SEQ ID NO: 25415 - protein, 12 aa, Artificial Sequence
  Synthetic construct
QSYDSSLSGPYV

SEQ ID NO: 25416 - protein, 9 aa, Artificial Sequence
  Synthetic construct
QKYDDWPPT

SEQ ID NO: 25417 - protein, 11 aa, Artificial Sequence
  Synthetic construct
YSTDIIGNSGV

SEQ ID NO: 25418 - protein, 10 aa, Artificial Sequence
  Synthetic construct
QSYDSSNRWV

SEQ ID NO: 25419 - protein, 9 aa, Artificial Sequence
  Synthetic construct
QQYYNSPRT

SEQ ID NO: 25420 - protein, 9 aa, Artificial Sequence
  Synthetic construct
QQSYSTPWT

SEQ ID NO: 25421 - protein, 10 aa, Artificial Sequence
  Synthetic construct
QQYDSFLSYT

SEQ ID NO: 25422 - protein, 10 aa, Artificial Sequence
  Synthetic construct
QHYYNWPPWT

SEQ ID NO: 25423 - protein, 9 aa, Artificial Sequence
  Synthetic construct
QQYYNSPRT

SEQ ID NO: 25424 - protein, 9 aa, Artificial Sequence
  Synthetic construct
QQYGSPALT

SEQ ID NO: 25425 - protein, 10 aa, Artificial Sequence
  Synthetic construct
SSYTSSSTYV

SEQ ID NO: 25426 - protein, 10 aa, Artificial Sequence
  Synthetic construct
HSRDSSANPL

SEQ ID NO: 25427 - protein, 8 aa, Artificial Sequence
  Synthetic construct
QQYNNWWT

SEQ ID NO: 25428 - protein, 10 aa, Artificial Sequence
  Synthetic construct
SSYTSSSTLV

SEQ ID NO: 25429 - protein, 11 aa, Artificial Sequence
  Synthetic construct
QSYDNSSPFWV

SEQ ID NO: 25430 - protein, 11 aa, Artificial Sequence
  Synthetic construct
SSYTSTTARVV

SEQ ID NO: 25431 - protein, 11 aa, Artificial Sequence
  Synthetic construct
QVWDGSSDHRV

SEQ ID NO: 25432 - protein, 9 aa, Artificial Sequence
  Synthetic construct
QQSYSPIWT

SEQ ID NO: 25433 - protein, 5 aa, Artificial Sequence
  Synthetic construct
MHPYT

SEQ ID NO: 25434 - protein, 9 aa, Artificial Sequence
  Synthetic construct
MQSLQTPWT

SEQ ID NO: 25435 - protein, 11 aa, Artificial Sequence
  Synthetic construct
QQRSNWPPRFT

SEQ ID NO: 25436 - protein, 9 aa, Artificial Sequence
  Synthetic construct
QQYGTSPYT

SEQ ID NO: 25437 - protein, 9 aa, Artificial Sequence
  Synthetic construct
QQSYSTPWT

SEQ ID NO: 25438 - protein, 9 aa, Artificial Sequence
  Synthetic construct
QQYGSPPST

SEQ ID NO: 25439 - protein, 9 aa, Artificial Sequence
  Synthetic construct
GTWDGSLSN

SEQ ID NO: 25440 - protein, 9 aa, Artificial Sequence
  Synthetic construct
QQYGSSPFT

SEQ ID NO: 25441 - protein, 9 aa, Artificial Sequence
  Synthetic construct
HQYDTLPRT

SEQ ID NO: 25442 - protein, 8 aa, Artificial Sequence
  Synthetic construct
QQYNNWWT

SEQ ID NO: 25443 - protein, 10 aa, Artificial Sequence
  Synthetic construct
TSYTGSSTVV

SEQ ID NO: 25444 - protein, 11 aa, Artificial Sequence
  Synthetic construct
QVWDGSSDHWV

SEQ ID NO: 25445 - protein, 9 aa, Artificial Sequence
  Synthetic construct
QTWGTGIQV

SEQ ID NO: 25446 - protein, 9 aa, Artificial Sequence
  Synthetic construct
QQYNSYPIT

SEQ ID NO: 25447 - protein, 9 aa, Artificial Sequence
  Synthetic construct
LQYNSYPLT

SEQ ID NO: 25448 - protein, 9 aa, Artificial Sequence
  Synthetic construct
QAWDSSTGV

SEQ ID NO: 25449 - protein, 11 aa, Artificial Sequence
  Synthetic construct
GTWDSSLSAVV

SEQ ID NO: 25450 - protein, 9 aa, Artificial Sequence
  Synthetic construct
LVSYSGAAV

SEQ ID NO: 25451 - protein, 11 aa, Artificial Sequence
  Synthetic construct
YSTDSSSNHRV

SEQ ID NO: 25452 - protein, 12 aa, Artificial Sequence
  Synthetic construct
QLWDSSTAHDTE

SEQ ID NO: 25453 - protein, 10 aa, Artificial Sequence
  Synthetic construct
CSYAGSYKGV

SEQ ID NO: 25454 - protein, 11 aa, Artificial Sequence
  Synthetic construct
GTWDSSLSTVV

SEQ ID NO: 25455 - protein, 9 aa, Artificial Sequence
  Synthetic construct
QQLNSYPIT

SEQ ID NO: 25456 - protein, 11 aa, Artificial Sequence
  Synthetic construct
QHRRNWPPRYT

SEQ ID NO: 25457 - protein, 7 aa, Artificial Sequence
  Synthetic construct
QEVNSYI

SEQ ID NO: 25458 - protein, 10 aa, Artificial Sequence
  Synthetic construct
QQRSNWPPYT

SEQ ID NO: 25459 - protein, 10 aa, Artificial Sequence
  Synthetic construct
MQGTHWPPCT

SEQ ID NO: 25460 - protein, 11 aa, Artificial Sequence
  Synthetic construct
QSYDSSLSGWV

SEQ ID NO: 25461 - protein, 10 aa, Artificial Sequence
  Synthetic construct
FSYTSRGTRV

SEQ ID NO: 25462 - protein, 10 aa, Artificial Sequence [sequence omitted]

SEQ ID NO: 25463 - protein, 12 aa, Artificial Sequence
  Synthetic construct
YSTDNSGNHRGV

SEQ ID NO: 25464 - protein, 10 aa, Artificial Sequence
  Synthetic construct
MQGTHWPPWT

SEQ ID NO: 25465 - protein, 9 aa, Artificial Sequence
  Synthetic construct
QQAHSFPPT

SEQ ID NO: 25466 - protein, 10 aa, Artificial Sequence
  Synthetic construct
SSYAGSNTYV

SEQ ID NO: 25467 - protein, 9 aa, Artificial Sequence
  Synthetic construct
QQSYNTPIT

SEQ ID NO: 25468 - protein, 9 aa, Artificial Sequence
  Synthetic construct
MQALQTPPT

SEQ ID NO: 25469 - protein, 10 aa, Artificial Sequence
  Synthetic construct
CSCAGSYKVI

SEQ ID NO: 25470 - protein, 9 aa, Artificial Sequence
  Synthetic construct
QQANSFPLT

SEQ ID NO: 25471 - protein, 9 aa, Artificial Sequence
  Synthetic construct
QAWDSNTAI

SEQ ID NO: 25472 - protein, 9 aa, Artificial Sequence
  Synthetic construct
QAWDSSNVV

SEQ ID NO: 25473 - protein, 10 aa, Artificial Sequence
  Synthetic construct
GLYLATGIWV

SEQ ID NO: 25474 - protein, 9 aa, Artificial Sequence
  Synthetic construct
YSAADNNRV

SEQ ID NO: 25475 - protein, 11 aa, Artificial Sequence
  Synthetic construct
QSYDSSLSDLV

SEQ ID NO: 25476 - protein, 11 aa, Artificial Sequence
  Synthetic construct
QVCDSGADPWV

SEQ ID NO: 25477 - protein, 10 aa, Artificial Sequence
  Synthetic construct
QQLNSYPEIT

SEQ ID NO: 25478 - protein, 10 aa, Artificial Sequence
  Synthetic construct
MQGTHWPPYT

SEQ ID NO: 25479 - protein, 12 aa, Artificial Sequence
  Synthetic construct
GTWDSSLSAPWV

SEQ ID NO: 25480 - protein, 9 aa, Artificial Sequence
  Synthetic construct
QQYYNTPPT

SEQ ID NO: 25481 - protein, 9 aa, Artificial Sequence
  Synthetic construct
CSYAGTFWV

SEQ ID NO: 25482 - protein, 11 aa, Artificial Sequence
  Synthetic construct
GTWDRSLSAVV

SEQ ID NO: 25483 - protein, 10 aa, Artificial Sequence
  Synthetic construct
QQRSNWPPFT

SEQ ID NO: 25484 - protein, 8 aa, Artificial Sequence
  Synthetic construct
QQYNKWLT

SEQ ID NO: 25485 - protein, 9 aa, Artificial Sequence
  Synthetic construct
QQYYSFPWT

SEQ ID NO: 25486 - protein, 11 aa, Artificial Sequence
  Synthetic construct
GTWDSSLSAAL

SEQ ID NO: 25487 - protein, 11 aa, Artificial Sequence
  Synthetic construct
GTWDNSLNVVL

SEQ ID NO: 25488 - protein, 9 aa, Artificial Sequence
  Synthetic construct
QQLNSYQYT

SEQ ID NO: 25489 - protein, 8 aa, Artificial Sequence
  Synthetic construct
QHSDLFAA

SEQ ID NO: 25490 - protein, 8 aa, Artificial Sequence
  Synthetic construct
QQYNKWWT

SEQ ID NO: 25491 - protein, 10 aa, Artificial Sequence
  Synthetic construct
SSYTSGSTYV

SEQ ID NO: 25492 - protein, 11 aa, Artificial Sequence
  Synthetic construct
QSADSSGTYPV

SEQ ID NO: 25493 - protein, 11 aa, Artificial Sequence
  Synthetic construct
QSYDSSLSGYV

SEQ ID NO: 25494 - protein, 9 aa, Artificial Sequence
  Synthetic construct
QQYYSTPYP

SEQ ID NO: 25495 - protein, 8 aa, Artificial Sequence
  Synthetic construct
QQRTSWLT

SEQ ID NO: 25496 - protein, 8 aa, Artificial Sequence
  Synthetic construct
QHYSNWWT

SEQ ID NO: 25497 - protein, 11 aa, Artificial Sequence
  Synthetic construct
ASWDDSLRAGV

SEQ ID NO: 25498 - protein, 11 aa, Artificial Sequence
  Synthetic construct
QQRSLRPPTWT

SEQ ID NO: 25499 - protein, 9 aa, Artificial Sequence
  Synthetic construct
QSADGSTWV

SEQ ID NO: 25500 - protein, 9 aa, Artificial Sequence
  Synthetic construct
QQRSISALT

SEQ ID NO: 25501 - protein, 9 aa, Artificial Sequence
  Synthetic construct
QTWDNSTYV

SEQ ID NO: 25502 - protein, 11 aa, Artificial Sequence
  Synthetic construct
SSTDNSGNHWV

SEQ ID NO: 25503 - protein, 11 aa, Artificial Sequence
  Synthetic construct
GTWDSSLSAYV

SEQ ID NO: 25504 - protein, 10 aa, Artificial Sequence
  Synthetic construct
QQYGSSPGYT

SEQ ID NO: 25505 - protein, 11 aa, Artificial Sequence
  Synthetic construct
SSYTSSSTLDV

SEQ ID NO: 25506 - protein, 9 aa, Artificial Sequence
  Synthetic construct
QQYNNRPYT

SEQ ID NO: 25507 - protein, 11 aa, Artificial Sequence
  Synthetic construct
QQRSNWPPSIT

SEQ ID NO: 25508 - protein, 9 aa, Artificial Sequence
  Synthetic construct
QQYGRSRLT

SEQ ID NO: 25509 - protein, 7 aa, Artificial Sequence
  Synthetic construct
QQYNTWT

SEQ ID NO: 25510 - protein, 11 aa, Artificial Sequence
  Synthetic construct
GTWDSSLSSWV

SEQ ID NO: 25511 - protein, 11 aa, Artificial Sequence
  Synthetic construct
GTWDNSLSAWV

SEQ ID NO: 25512 - protein, 16 aa, Artificial Sequence
  Synthetic construct
QHYDILPRQHYDNVPR

SEQ ID NO: 25513 - protein, 11 aa, Artificial Sequence
  Synthetic construct
QVWDGSSDHWV

SEQ ID NO: 25514 - protein, 9 aa, Artificial Sequence
  Synthetic construct
QQYGGSPLT

SEQ ID NO: 25515 - protein, 8 aa, Artificial Sequence
  Synthetic construct
CSSASSWV

SEQ ID NO: 25516 - protein, 10 aa, Artificial Sequence
  Synthetic construct
QRRSNWPPFT

SEQ ID NO: 25517 - protein, 8 aa, Artificial Sequence
  Synthetic construct
QQYNSYWT

SEQ ID NO: 25518 - protein, 9 aa, Artificial Sequence
  Synthetic construct
QQYGSSQGT

SEQ ID NO: 25519 - protein, 11 aa, Artificial Sequence
  Synthetic construct
KSRDRSGDHLM

SEQ ID NO: 25520 - protein, 10 aa, Artificial Sequence
  Synthetic construct
CSYAGSYTVV

SEQ ID NO: 25521 - protein, 10 aa, Artificial Sequence
  Synthetic construct
SSYTSSSTWV

SEQ ID NO: 25522 - protein, 9 aa, Artificial Sequence
  Synthetic construct
QQYGTSPLT

SEQ ID NO: 25523 - protein, 10 aa, Artificial Sequence
  Synthetic construct
QQYGSSPGYT

SEQ ID NO: 25524 - protein, 9 aa, Artificial Sequence
  Synthetic construct
QQYYSTPLT

SEQ ID NO: 25525 - protein, 10 aa, Artificial Sequence [sequence omitted]

SEQ ID NO: 25526 - protein, 9 aa, Artificial Sequence
  Synthetic construct
QQSFSTPQT

SEQ ID NO: 25527 - protein, 8 aa, Artificial Sequence
  Synthetic construct
QHYDNVPR

SEQ ID NO: 25528 - protein, 9 aa, Artificial Sequence
  Synthetic construct
HQSSSLPLT

SEQ ID NO: 25529 - protein, 10 aa, Artificial Sequence
  Synthetic construct
QTWDTDILRV

SEQ ID NO: 25530 - protein, 9 aa, Artificial Sequence
  Synthetic construct
QQYVSSPGT

SEQ ID NO: 25531 - protein, 9 aa, Artificial Sequence
  Synthetic construct
QAWDSSTYV

SEQ ID NO: 25532 - protein, 9 aa, Artificial Sequence
  Synthetic construct
QQTYTTPQT

SEQ ID NO: 25533 - protein, 9 aa, Artificial Sequence
  Synthetic construct
MQALQIPWT

SEQ ID NO: 25534 - protein, 16 aa, Artificial Sequence
  Synthetic construct
CSYAGSTSVVGSTSVV

SEQ ID NO: 25535 - protein, 7 aa, Artificial Sequence
  Synthetic construct
QQYNTWT

SEQ ID NO: 25536 - protein, 10 aa, Artificial Sequence
  Synthetic construct
QQYHDWPPWT

SEQ ID NO: 25537 - protein, 9 aa, Artificial Sequence
  Synthetic construct
QQYYTTPYT

SEQ ID NO: 25538 - protein, 9 aa, Artificial Sequence
  Synthetic construct
QKYDDWPPT

SEQ ID NO: 25539 - protein, 9 aa, Artificial Sequence
  Synthetic construct
QQYYRSPGM

SEQ ID NO: 25540 - protein, 11 aa, Artificial Sequence
  Synthetic construct
QSYDSSLSGWV

SEQ ID NO: 25541 - protein, 9 aa, Artificial Sequence
  Synthetic construct
LQHHTYPIT

SEQ ID NO: 25542 - protein, 9 aa, Artificial Sequence
  Synthetic construct
QQLNSYPIT

SEQ ID NO: 25543 - protein, 8 aa, Artificial Sequence
  Synthetic construct
CSYAHSWV

SEQ ID NO: 25544 - protein, 9 aa, Artificial Sequence
  Synthetic construct
QQYGSSPLT

SEQ ID NO: 25545 - protein, 9 aa, Artificial Sequence
  Synthetic construct
QQYNNWPLT

SEQ ID NO: 25546 - protein, 9 aa, Artificial Sequence
  Synthetic construct
QQYGSSPQT

SEQ ID NO: 25547 - protein, 9 aa, Artificial Sequence
  Synthetic construct
QQSYSTPGT

SEQ ID NO: 25548 - protein, 11 aa, Artificial Sequence
  Synthetic construct
HHRFNWPPRLT

SEQ ID NO: 25549 - protein, 9 aa, Artificial Sequence
  Synthetic construct
QQYNNWPRT

SEQ ID NO: 25550 - protein, 9 aa, Artificial Sequence
  Synthetic construct
QHYHTSPIT

SEQ ID NO: 25551 - protein, 8 aa, Artificial Sequence
  Synthetic construct
QHYDNLPR

SEQ ID NO: 25552 - protein, 10 aa, Artificial Sequence
  Synthetic construct
QHYNGWPPFT

SEQ ID NO: 25553 - protein, 9 aa, Artificial Sequence
  Synthetic construct
QAWDSSTGG

SEQ ID NO: 25554 - protein, 11 aa, Artificial Sequence
  Synthetic construct
QHRSNWPPALT

SEQ ID NO: 25555 - protein, 12 aa, Artificial Sequence
  Synthetic construct
HSTDNSGNHRGV

SEQ ID NO: 25556 - protein, 10 aa, Artificial Sequence
  Synthetic construct
HQYGYSLPNT

SEQ ID NO: 25557 - protein, 10 aa, Artificial Sequence [sequence omitted]

SEQ ID NO: 25558 - protein, 10 aa, Artificial Sequence
  Synthetic construct
QQYTNWPPYT

SEQ ID NO: 25559 - protein, 9 aa, Artificial Sequence
  Synthetic construct
QVWDSSTAI

SEQ ID NO: 25560 - protein, 8 aa, Artificial Sequence
  Synthetic construct
QQANSFWT

SEQ ID NO: 25561 - protein, 10 aa, Artificial Sequence
  Synthetic construct
FSYTSRGTRV

SEQ ID NO: 25562 - protein, 10 aa, Artificial Sequence
  Synthetic construct
MQATHWPPWT

SEQ ID NO: 25563 - protein, 10 aa, Artificial Sequence
  Synthetic construct
CSYAGSSTFV

SEQ ID NO: 25564 - protein, 11 aa, Artificial Sequence
  Synthetic construct
AAWDDTLSGEV

SEQ ID NO: 25565 - protein, 11 aa, Artificial Sequence
  Synthetic construct
QQRSNWPPKLT

SEQ ID NO: 25566 - protein, 11 aa, Artificial Sequence
  Synthetic construct
NSRDSSGNLVV

SEQ ID NO: 25567 - protein, 11 aa, Artificial Sequence
  Synthetic construct
QSYDSSLSGYV

SEQ ID NO: 25568 - protein, 11 aa, Artificial Sequence
  Synthetic construct
QSYDSSESGNV

SEQ ID NO: 25569 - protein, 6 aa, Artificial Sequence
  Synthetic construct
QQYYGT

SEQ ID NO: 25570 - protein, 12 aa, Artificial Sequence
  Synthetic construct
AAWDDSLNGHLL

SEQ ID NO: 25571 - protein, 10 aa, Artificial Sequence
  Synthetic construct
CSYAGFSTYV

SEQ ID NO: 25572 - protein, 9 aa, Artificial Sequence
  Synthetic construct
QQSFSTPYT

SEQ ID NO: 25573 - protein, 9 aa, Artificial Sequence
  Synthetic construct
QQYGSSPFT

SEQ ID NO: 25574 - protein, 9 aa, Artificial Sequence
  Synthetic construct
QQSYSSPRT

SEQ ID NO: 25575 - protein, 9 aa, Artificial Sequence
  Synthetic construct
MQTIHPPYT

SEQ ID NO: 25576 - protein, 9 aa, Artificial Sequence
  Synthetic construct
QQYGNSPWT

SEQ ID NO: 25577 - protein, 9 aa, Artificial Sequence
  Synthetic construct
QSADGSTWV

SEQ ID NO: 25578 - protein, 8 aa, Artificial Sequence
  Synthetic construct
QQRTDSVT

SEQ ID NO: 25579 - protein, 10 aa, Artificial Sequence
  Synthetic construct
QHYGGSPLWT

SEQ ID NO: 25580 - protein, 9 aa, Artificial Sequence
  Synthetic construct
QHYNSHSGA

SEQ ID NO: 25581 - protein, 12 aa, Artificial Sequence
  Synthetic construct
YSTDSSYNHGGV

SEQ ID NO: 25582 - protein, 9 aa, Artificial Sequence
  Synthetic construct
QQYNSYPYT

SEQ ID NO: 25583 - protein, 10 aa, Artificial Sequence
  Synthetic construct
QTWGTGIHVV

SEQ ID NO: 25584 - protein, 11 aa, Artificial Sequence
  Synthetic construct
QVWDSSTDHRM

SEQ ID NO: 25585 - protein, 9 aa, Artificial Sequence
  Synthetic construct
YSTVSSGKR

SEQ ID NO: 25586 - protein, 8 aa, Artificial Sequence
  Synthetic construct
QQYNSYYT

SEQ ID NO: 25587 - protein, 8 aa, Artificial Sequence
  Synthetic construct
QQRGSWYT

SEQ ID NO: 25588 - protein, 9 aa, Artificial Sequence
  Synthetic construct
QQYGNSRLT

SEQ ID NO: 25589 - protein, 8 aa, Artificial Sequence
  Synthetic construct
QQSTSGFT

SEQ ID NO: 25590 - protein, 9 aa, Artificial Sequence
  Synthetic construct
QKYDDWPPT

SEQ ID NO: 25591 - protein, 9 aa, Artificial Sequence
  Synthetic construct
QQTYSIPRT

SEQ ID NO: 25592 - protein, 9 aa, Artificial Sequence
  Synthetic construct
QQLSGYPYT

SEQ ID NO: 25593 - protein, 11 aa, Artificial Sequence
  Synthetic construct
QVWAGSRDLVV

SEQ ID NO: 25594 - protein, 11 aa, Artificial Sequence
  Synthetic construct
ETWDSSLSGGV

SEQ ID NO: 25595 - protein, 8 aa, Artificial Sequence
  Synthetic construct
QQYNNWRT

SEQ ID NO: 25596 - protein, 8 aa, Artificial Sequence
  Synthetic construct
CSYAHTWV

SEQ ID NO: 25597 - protein, 9 aa, Artificial Sequence
  Synthetic construct
QAWDSSTVV

SEQ ID NO: 25598 - protein, 11 aa, Artificial Sequence
  Synthetic construct
AAWDDSLNGWV

SEQ ID NO: 25599 - protein, 9 aa, Artificial Sequence
  Synthetic construct
QQYISVPFT

SEQ ID NO: 25600 - protein, 10 aa, Artificial Sequence
  Synthetic construct
QQHYSTPGYT

SEQ ID NO: 25601 - protein, 9 aa, Artificial Sequence
  Synthetic construct
HQSSSLPWT

SEQ ID NO: 25602 - protein, 9 aa, Artificial Sequence
  Synthetic construct
QQYYSIPPT

SEQ ID NO: 25603 - protein, 10 aa, Artificial Sequence
  Synthetic construct
CSYAGSSTWV

SEQ ID NO: 25604 - protein, 10 aa, Artificial Sequence
  Synthetic construct
SSYAGSNNLV

SEQ ID NO: 25605 - protein, 8 aa, Artificial Sequence
  Synthetic construct
QAWDSSVV

SEQ ID NO: 25606 - protein, 9 aa, Artificial Sequence
  Synthetic construct
MQALQTPWT

SEQ ID NO: 25607 - protein, 9 aa, Artificial Sequence
  Synthetic construct
QQANSFPFT

SEQ ID NO: 25608 - protein, 8 aa, Artificial Sequence
  Synthetic construct
QAWDSSVV

SEQ ID NO: 25609 - protein, 11 aa, Artificial Sequence
  Synthetic construct
YSTGSSGNHRV

SEQ ID NO: 25610 - protein, 10 aa, Artificial Sequence
  Synthetic construct
SSYAGSNPLV

SEQ ID NO: 25611 - protein, 9 aa, Artificial Sequence
  Synthetic construct
QSADGSTWV

SEQ ID NO: 25612 - protein, 11 aa, Artificial Sequence
  Synthetic construct
GTWDGSLSLFA

SEQ ID NO: 25613 - protein, 9 aa, Artificial Sequence
  Synthetic construct
QAWDRSTVV

SEQ ID NO: 25614 - protein, 9 aa, Artificial Sequence
  Synthetic construct
MQSIQLPLT

SEQ ID NO: 25615 - protein, 9 aa, Artificial Sequence
  Synthetic construct
MQALHFPYT

SEQ ID NO: 25616 - protein, 9 aa, Artificial Sequence
  Synthetic construct
QKYDDWPPT

SEQ ID NO: 25617 - protein, 11 aa, Artificial Sequence
  Synthetic construct
QSYDSTLSALV

SEQ ID NO: 25618 - protein, 9 aa, Artificial Sequence
  Synthetic construct
QQYYSTPYT

SEQ ID NO: 25619 - protein, 9 aa, Artificial Sequence
  Synthetic construct
QQYDNLPIT

SEQ ID NO: 25620 - protein, 11 aa, Artificial Sequence
  Synthetic construct
AAWDDRLNGPV

SEQ ID NO: 25621 - protein, 9 aa, Artificial Sequence
  Synthetic construct
MQALQTPIT

SEQ ID NO: 25622 - protein, 11 aa, Artificial Sequence
  Synthetic construct
QQRSNWPPRST

SEQ ID NO: 25623 - protein, 8 aa, Artificial Sequence
  Synthetic construct
QQYYSAPT

SEQ ID NO: 25624 - protein, 10 aa, Artificial Sequence
  Synthetic construct
SSYSSSASYL

SEQ ID NO: 25625 - protein, 11 aa, Artificial Sequence
  Synthetic construct
GTWDGSLSLFA

SEQ ID NO: 25626 - protein, 9 aa, Artificial Sequence
  Synthetic construct
MQTIQLPYT

SEQ ID NO: 25627 - protein, 9 aa, Artificial Sequence
  Synthetic construct
QAWDRSTVV

SEQ ID NO: 25628 - protein, 11 aa, Artificial Sequence
  Synthetic construct
QQRSNGPPTWT

SEQ ID NO: 25629 - protein, 10 aa, Artificial Sequence
  Synthetic construct
SSYAGSNPLV

SEQ ID NO: 25630 - protein, 11 aa, Artificial Sequence
  Synthetic construct
QQRSNWPPIFT

SEQ ID NO: 25631 - protein, 9 aa, Artificial Sequence
  Synthetic construct
QQYDSYPLT

SEQ ID NO: 25632 - protein, 10 aa, Artificial Sequence
  Synthetic construct
QSYDSSLSYV

SEQ ID NO: 25633 - protein, 9 aa, Artificial Sequence
  Synthetic construct
LLHYAGAWV

SEQ ID NO: 25634 - protein, 9 aa, Artificial Sequence
  Synthetic construct
HQYGRSQGT

SEQ ID NO: 25635 - protein, 10 aa, Artificial Sequence
  Synthetic construct
QQRSNWPPFT

SEQ ID NO: 25636 - protein, 11 aa, Artificial Sequence
  Synthetic construct
GTWDTSLSLYV

SEQ ID NO: 25637 - protein, 10 aa, Artificial Sequence [sequence omitted]

SEQ ID NO: 25638 - protein, 9 aa, Artificial Sequence
  Synthetic construct
LQHNSYPLT

SEQ ID NO: 25639 - protein, 9 aa, Artificial Sequence
  Synthetic construct
QAWDSNTYV

SEQ ID NO: 25640 - protein, 12 aa, Artificial Sequence
  Synthetic construct
QSYDTSLSGPYV

SEQ ID NO: 25641 - protein, 9 aa, Artificial Sequence
  Synthetic construct
QQYYSYSGT

SEQ ID NO: 25642 - protein, 8 aa, Artificial Sequence
  Synthetic construct
QQNYSWYT

SEQ ID NO: 25643 - protein, 8 aa, Artificial Sequence
  Synthetic construct
QAWDSSVV

SEQ ID NO: 25644 - protein, 10 aa, Artificial Sequence
  Synthetic construct
YSTDSSGKGV

SEQ ID NO: 25645 - protein, 10 aa, Artificial Sequence
  Synthetic construct
QQYNYWPPIT

SEQ ID NO: 25646 - protein, 11 aa, Artificial Sequence
  Synthetic construct
QVWDNTSDQGV

SEQ ID NO: 25647 - protein, 11 aa, Artificial Sequence
  Synthetic construct
QQRSNWPPRIT

SEQ ID NO: 25648 - protein, 10 aa, Artificial Sequence
  Synthetic construct
QQYNNWPPYT

SEQ ID NO: 25649 - protein, 9 aa, Artificial Sequence
  Synthetic construct
SSYTTSSVV

SEQ ID NO: 25650 - protein, 9 aa, Artificial Sequence
  Synthetic construct
QQYYSTPNT

SEQ ID NO: 25651 - protein, 9 aa, Artificial Sequence
  Synthetic construct
LQHNSYPLT

SEQ ID NO: 25652 - protein, 8 aa, Artificial Sequence
  Synthetic construct
QVWDSSVV

SEQ ID NO: 25653 - protein, 11 aa, Artificial Sequence
  Synthetic construct
FSTDSSGNHWV

SEQ ID NO: 25654 - protein, 9 aa, Artificial Sequence
  Synthetic construct
LQYNSYPLT

SEQ ID NO: 25655 - protein, 9 aa, Artificial Sequence
  Synthetic construct
QHYGSSPWT

SEQ ID NO: 25656 - protein, 10 aa, Artificial Sequence
  Synthetic construct
QQSYSTPQLT

SEQ ID NO: 25657 - protein, 10 aa, Artificial Sequence
  Synthetic construct
SSFTSSSTYV

SEQ ID NO: 25658 - protein, 10 aa, Artificial Sequence
  Synthetic construct
QQSYSTPLFT

SEQ ID NO: 25659 - protein, 9 aa, Artificial Sequence
  Synthetic construct
HQYYNSPPT

SEQ ID NO: 25660 - protein, 8 aa, Artificial Sequence
  Synthetic construct
QQRSNWLT

SEQ ID NO: 25661 - protein, 11 aa, Artificial Sequence
  Synthetic construct
GTWDSSLSLFA

SEQ ID NO: 25662 - protein, 11 aa, Artificial Sequence
  Synthetic construct
AAWDDSLSAWV

SEQ ID NO: 25663 - protein, 9 aa, Artificial Sequence
  Synthetic construct
LQYNSYPLT

SEQ ID NO: 25664 - protein, 8 aa, Artificial Sequence
  Synthetic construct
HQYGNSLS

SEQ ID NO: 25665 - protein, 9 aa, Artificial Sequence
  Synthetic construct
QQLSGYPYT

SEQ ID NO: 25666 - protein, 9 aa, Artificial Sequence
  Synthetic construct
QAWVGSTWV

SEQ ID NO: 25667 - protein, 12 aa, Artificial Sequence
  Synthetic construct
GTWHSSLSAGGV

SEQ ID NO: 25668 - protein, 9 aa, Artificial Sequence
  Synthetic construct
QKYNSVPLT

SEQ ID NO: 25669 - protein, 11 aa, Artificial Sequence
  Synthetic construct
CSYANSSTQWV

SEQ ID NO: 25670 - protein, 9 aa, Artificial Sequence
  Synthetic construct
YSTDRSGNR

SEQ ID NO: 25671 - protein, 9 aa, Artificial Sequence
  Synthetic construct
QQYYSSPQT

SEQ ID NO: 25672 - protein, 11 aa, Artificial Sequence
  Synthetic construct
YSTDSSGNRGV

SEQ ID NO: 25673 - protein, 9 aa, Artificial Sequence
  Synthetic construct
QQYDSSPYT

SEQ ID NO: 25674 - protein, 11 aa, Artificial Sequence
  Synthetic construct
QVWDSGRDHVV

SEQ ID NO: 25675 - protein, 11 aa, Artificial Sequence
  Synthetic construct
ATWDDSLNGYV

SEQ ID NO: 25676 - protein, 9 aa, Artificial Sequence
  Synthetic construct
QQYNSYPPT

SEQ ID NO: 25677 - protein, 9 aa, Artificial Sequence
  Synthetic construct
QAWDSSTVV

SEQ ID NO: 25678 - protein, 10 aa, Artificial Sequence
  Synthetic construct
QSYDSSLRGV

SEQ ID NO: 25679 - protein, 11 aa, Artificial Sequence
  Synthetic construct
QTYDSSLRGYV

SEQ ID NO: 25680 - protein, 10 aa, Artificial Sequence
  Synthetic construct
QAWDISTGGV

SEQ ID NO: 25681 - protein, 9 aa, Artificial Sequence
  Synthetic construct
QQSYSTPFT

SEQ ID NO: 25682 - protein, 11 aa, Artificial Sequence
  Synthetic construct
QQRSNWPPRYT

SEQ ID NO: 25683 - protein, 11 aa, Artificial Sequence
  Synthetic construct
GTWDSSLSAVV

SEQ ID NO: 25684 - protein, 11 aa, Artificial Sequence
  Synthetic construct
QSYDSSLSGNV

SEQ ID NO: 25685 - protein, 8 aa, Artificial Sequence
  Synthetic construct
MGSTQFVT

SEQ ID NO: 25686 - protein, 10 aa, Artificial Sequence
  Synthetic construct
QQYGSSPGAT

SEQ ID NO: 25687 - protein, 13 aa, Artificial Sequence
  Synthetic construct
KSRDSSVSHLGWV

SEQ ID NO: 25688 - protein, 10 aa, Artificial Sequence
  Synthetic construct
SSYTSSSPFV

SEQ ID NO: 25689 - protein, 10 aa, Artificial Sequence
  Synthetic construct
YSTDRSGKGV

SEQ ID NO: 25690 - protein, 11 aa, Artificial Sequence
  Synthetic construct
QSYDSSLSGAV

SEQ ID NO: 25691 - protein, 12 aa, Artificial Sequence
  Synthetic construct
YSTDNSANPRGV

SEQ ID NO: 25692 - protein, 9 aa, Artificial Sequence
  Synthetic construct
LLFYSGARV

SEQ ID NO: 25693 - protein, 8 aa, Artificial Sequence
  Synthetic construct
MQSMQLLF

SEQ ID NO: 25694 - protein, 11 aa, Artificial Sequence
  Synthetic construct
QYRSNWPPRFT

SEQ ID NO: 25695 - protein, 9 aa, Artificial Sequence
  Synthetic construct
QQSYSNPRT

SEQ ID NO: 25696 - protein, 10 aa, Artificial Sequence
  Synthetic construct
QQYGSSPVYS

SEQ ID NO: 25697 - protein, 9 aa, Artificial Sequence
  Synthetic construct
MQSIQPPYT

SEQ ID NO: 25698 - protein, 8 aa, Artificial Sequence
  Synthetic construct
QHYDDLPR

SEQ ID NO: 25699 - protein, 9 aa, Artificial Sequence
  Synthetic construct
QQFDDWPLT

SEQ ID NO: 25700 - protein, 9 aa, Artificial Sequence
  Synthetic construct
QQSYSTPPT

SEQ ID NO: 25701 - protein, 9 aa, Artificial Sequence
  Synthetic construct
QQYNSYSYT

SEQ ID NO: 25702 - protein, 9 aa, Artificial Sequence
  Synthetic construct
QESYSTPRT

SEQ ID NO: 25703 - protein, 11 aa, Artificial Sequence
  Synthetic construct
GTWDTSLDAGV

SEQ ID NO: 25704 - protein, 12 aa, Artificial Sequence
  Synthetic construct
GTWHSSLSAGGV

SEQ ID NO: 25705 - protein, 10 aa, Artificial Sequence
  Synthetic construct
QSYDNSLKVV

SEQ ID NO: 25706 - protein, 9 aa, Artificial Sequence
  Synthetic construct
QQYYSTPRT

SEQ ID NO: 25707 - protein, 9 aa, Artificial Sequence
  Synthetic construct
QQLSSYPVT

SEQ ID NO: 25708 - protein, 9 aa, Artificial Sequence
  Synthetic construct
QQYGSSPAT

SEQ ID NO: 25709 - protein, 8 aa, Artificial Sequence
  Synthetic construct
QQYANLYT

SEQ ID NO: 25710 - protein, 9 aa, Artificial Sequence
  Synthetic construct
QQYGSSVLT

SEQ ID NO: 25711 - protein, 11 aa, Artificial Sequence
  Synthetic construct
NSRDSTGNHQV

SEQ ID NO: 25712 - protein, 11 aa, Artificial Sequence
  Synthetic construct
QSFDSTNPHVI

SEQ ID NO: 25713 - protein, 10 aa, Artificial Sequence
  Synthetic construct
YSTDSSGKGV

SEQ ID NO: 25714 - protein, 12 aa, Artificial Sequence
  Synthetic construct
YSTDSSDNHKRV

SEQ ID NO: 25715 - protein, 10 aa, Artificial Sequence
  Synthetic construct
QQYGSSPGYT

SEQ ID NO: 25716 - protein, 9 aa, Artificial Sequence
  Synthetic construct
QQYNNWPYT

SEQ ID NO: 25717 - protein, 10 aa, Artificial Sequence
  Synthetic construct
SSHTSSNIWV

SEQ ID NO: 25718 - protein, 9 aa, Artificial Sequence
  Synthetic construct
MTWHSGGLV

SEQ ID NO: 25719 - protein, 9 aa, Artificial Sequence
  Synthetic construct
QQLNSYPRT

SEQ ID NO: 25720 - protein, 9 aa, Artificial Sequence
  Synthetic construct
MQALETPWT

SEQ ID NO: 25721 - protein, 9 aa, Artificial Sequence
  Synthetic construct
GSYTSSSVV

SEQ ID NO: 25722 - protein, 10 aa, Artificial Sequence
  Synthetic construct
QQSYSTPPWT

SEQ ID NO: 25723 - protein, 11 aa, Artificial Sequence
  Synthetic construct
ATWDDSLNGWV

SEQ ID NO: 25724 - protein, 11 aa, Artificial Sequence
  Synthetic construct
GAWDSSLSAGV

SEQ ID NO: 25725 - protein, 10 aa, Artificial Sequence
  Synthetic construct
QQSYSIPPLT

SEQ ID NO: 25726 - protein, 12 aa, Artificial Sequence
  Synthetic construct
QSYDSSLSGPYV

SEQ ID NO: 25727 - protein, 11 aa, Artificial Sequence
  Synthetic construct
QVWDGSSDHWV

SEQ ID NO: 25728 - protein, 9 aa, Artificial Sequence
  Synthetic construct
QQYNNWPYT

SEQ ID NO: 25729 - protein, 9 aa, Artificial Sequence
  Synthetic construct
QQYNNWPYT

SEQ ID NO: 25730 - protein, 9 aa, Artificial Sequence
  Synthetic construct
QQYGTSPWT

SEQ ID NO: 25731 - protein, 12 aa, Artificial Sequence
  Synthetic construct
SSYTSSSTPNWV

SEQ ID NO: 25732 - protein, 10 aa, Artificial Sequence
  Synthetic construct
SSYRSSSTWV

SEQ ID NO: 25733 - protein, 9 aa, Artificial Sequence
  Synthetic construct
QTWDSSTVV

SEQ ID NO: 25734 - protein, 8 aa, Artificial Sequence
  Synthetic construct
QQYGTSPS

SEQ ID NO: 25735 - protein, 10 aa, Artificial Sequence
  Synthetic construct
SSNAGSAKLV

SEQ ID NO: 25736 - protein, 11 aa, Artificial Sequence
  Synthetic construct
SSTDNSGHHWV

SEQ ID NO: 25737 - protein, 9 aa, Artificial Sequence
  Synthetic construct
QAWDSSTVV

SEQ ID NO: 25738 - protein, 9 aa, Artificial Sequence
  Synthetic construct
QQTYSSPLT

SEQ ID NO: 25739 - protein, 11 aa, Artificial Sequence
  Synthetic construct
YSTDSSGNHRV

SEQ ID NO: 25740 - protein, 11 aa, Artificial Sequence
  Synthetic construct
SSYTSSSTPYV

SEQ ID NO: 25741 - protein, 9 aa, Artificial Sequence
  Synthetic construct
MQSIQSPYT

SEQ ID NO: 25742 - protein, 9 aa, Artificial Sequence
  Synthetic construct
MQSLQLPYT

SEQ ID NO: 25743 - protein, 10 aa, Artificial Sequence
  Synthetic construct
LLSYSGAFYV

SEQ ID NO: 25744 - protein, 11 aa, Artificial Sequence
  Synthetic construct
QQRSNRPPTWT

SEQ ID NO: 25745 - protein, 9 aa, Artificial Sequence
  Synthetic construct
QQYNNWPLT

SEQ ID NO: 25746 - protein, 9 aa, Artificial Sequence
  Synthetic construct
QQYDNLSLT

SEQ ID NO: 25747 - protein, 10 aa, Artificial Sequence
  Synthetic construct
SSYAGSNNVL

SEQ ID NO: 25748 - protein, 9 aa, Artificial Sequence
  Synthetic construct
QQYNSYPWT

SEQ ID NO: 25749 - protein, 9 aa, Artificial Sequence
  Synthetic construct
QQSYTTPLT

SEQ ID NO: 25750 - protein, 9 aa, Artificial Sequence
  Synthetic construct
HQSGSLPLT

SEQ ID NO: 25751 - protein, 9 aa, Artificial Sequence
  Synthetic construct
QAWDSSTWV

SEQ ID NO: 25752 - protein, 11 aa, Artificial Sequence
  Synthetic construct
QVLDSNNDHWV

SEQ ID NO: 25753 - protein, 9 aa, Artificial Sequence
  Synthetic construct
QQYNTYPPT

SEQ ID NO: 25754 - protein, 10 aa, Artificial Sequence
  Synthetic construct
SSYAGNNNLV

SEQ ID NO: 25755 - protein, 11 aa, Artificial Sequence
  Synthetic construct
QVWDSSSDHFV

SEQ ID NO: 25756 - protein, 9 aa, Artificial Sequence
  Synthetic construct
MQALQTPIT

SEQ ID NO: 25757 - protein, 10 aa, Artificial Sequence
  Synthetic construct
CSYAGTYTWI

SEQ ID NO: 25758 - protein, 9 aa, Artificial Sequence
  Synthetic construct
QTWDSSTVV

SEQ ID NO: 25759 - protein, 9 aa, Artificial Sequence
  Synthetic construct
QQYGSSPRT

SEQ ID NO: 25760 - protein, 10 aa, Artificial Sequence
  Synthetic construct
QQTYSAPGGT

SEQ ID NO: 25761 - protein, 9 aa, Artificial Sequence
  Synthetic construct
QQYNSYSRT

SEQ ID NO: 25762 - protein, 9 aa, Artificial Sequence
  Synthetic construct
QQSYSTPLT

SEQ ID NO: 25763 - protein, 10 aa, Artificial Sequence
  Synthetic construct
QQRSNWPPFT

SEQ ID NO: 25764 - protein, 10 aa, Artificial Sequence
  Synthetic construct
YSFAGSSSWV

SEQ ID NO: 25765 - protein, 11 aa, Artificial Sequence
  Synthetic construct
AAWDTSLSAGV

SEQ ID NO: 25766 - protein, 11 aa, Artificial Sequence
  Synthetic construct
GTWDSSLSVYV

SEQ ID NO: 25767 - protein, 10 aa, Artificial Sequence
  Synthetic construct
YSYAGSSTWV

SEQ ID NO: 25768 - protein, 11 aa, Artificial Sequence
  Synthetic construct
ASWDDSLRAGV

SEQ ID NO: 25769 - protein, 11 aa, Artificial Sequence
  Synthetic construct
AAWDDSLNGWV

SEQ ID NO: 25770 - protein, 9 aa, Artificial Sequence
  Synthetic construct
QQLSSYPVT

SEQ ID NO: 25771 - protein, 10 aa, Artificial Sequence
  Synthetic construct
QQYGSSPPLT

SEQ ID NO: 25772 - protein, 9 aa, Artificial Sequence
  Synthetic construct
QQYSSYSAT

SEQ ID NO: 25773 - protein, 9 aa, Artificial Sequence
  Synthetic construct
LQHNSYPLT

SEQ ID NO: 25774 - protein, 11 aa, Artificial Sequence
  Synthetic construct
ATWDDSLNGYV

SEQ ID NO: 25775 - protein, 9 aa, Artificial Sequence
  Synthetic construct
QQSYSTPRT

SEQ ID NO: 25776 - protein, 10 aa, Artificial Sequence
  Synthetic construct
QQGNSFPPYT

SEQ ID NO: 25777 - protein, 12 aa, Artificial Sequence
  Synthetic construct
CSYAGSNTFIVV

SEQ ID NO: 25778 - protein, 11 aa, Artificial Sequence
  Synthetic construct
YSGDSSANHWV

SEQ ID NO: 25779 - protein, 13 aa, Artificial Sequence
  Synthetic construct
GADHGSGSNFVYV

SEQ ID NO: 25780 - protein, 11 aa, Artificial Sequence
  Synthetic construct
GTWDNSLNVVL

SEQ ID NO: 25781 - protein, 11 aa, Artificial Sequence
  Synthetic construct
FSTDISGNQRV

SEQ ID NO: 25782 - protein, 9 aa, Artificial Sequence
  Synthetic construct
QQSYISPWT

SEQ ID NO: 25783 - protein, 9 aa, Artificial Sequence
  Synthetic construct
MQVVQAPRT

SEQ ID NO: 25784 - protein, 10 aa, Artificial Sequence
  Synthetic construct
QQRSNWPPFT

SEQ ID NO: 25785 - protein, 12 aa, Artificial Sequence
  Synthetic construct
SSYAGSNNFYVV

SEQ ID NO: 25786 - protein, 11 aa, Artificial Sequence
  Synthetic construct
QSADSSGTYPV

SEQ ID NO: 25787 - protein, 11 aa, Artificial Sequence
  Synthetic construct
YSTDSSGNHWV

SEQ ID NO: 25788 - protein, 10 aa, Artificial Sequence
  Synthetic construct
QHYDNWPPIT

SEQ ID NO: 25789 - protein, 12 aa, Artificial Sequence
  Synthetic construct
YSTDDSANHRGI

SEQ ID NO: 25790 - protein, 9 aa, Artificial Sequence
  Synthetic construct
HQSSTVPYT

SEQ ID NO: 25791 - protein, 9 aa, Artificial Sequence
  Synthetic construct
HQYDNLPRT

SEQ ID NO: 25792 - protein, 9 aa, Artificial Sequence
  Synthetic construct
LQHNSYPLT

SEQ ID NO: 25793 - protein, 12 aa, Artificial Sequence
  Synthetic construct
YSTDSTDNHKGV

SEQ ID NO: 25794 - protein, 10 aa, Artificial Sequence
  Synthetic construct
QSYDSSLSYV

SEQ ID NO: 25795 - protein, 9 aa, Artificial Sequence
  Synthetic construct
QQYASSPRT

SEQ ID NO: 25796 - protein, 8 aa, Artificial Sequence
  Synthetic construct
QQYDTFWT

SEQ ID NO: 25797 - protein, 9 aa, Artificial Sequence
  Synthetic construct
MQATQFPWT

SEQ ID NO: 25798 - protein, 13 aa, Artificial Sequence
  Synthetic construct
QSYDSSLSGSGWV

SEQ ID NO: 25799 - protein, 9 aa, Artificial Sequence
  Synthetic construct
QQYDNLPWT

SEQ ID NO: 25800 - protein, 9 aa, Artificial Sequence
  Synthetic construct
QQYGSPPDT

SEQ ID NO: 25801 - protein, 9 aa, Artificial Sequence
  Synthetic construct
QQYGYSPWT

SEQ ID NO: 25802 - protein, 8 aa, Artificial Sequence
  Synthetic construct
HQYGSSYT

SEQ ID NO: 25803 - protein, 11 aa, Artificial Sequence
  Synthetic construct
AAWDDSLSGEV

SEQ ID NO: 25804 - protein, 8 aa, Artificial Sequence
  Synthetic construct
HQSYSTPT

SEQ ID NO: 25805 - protein, 11 aa, Artificial Sequence
  Synthetic construct
YSTDSSGNQRV

SEQ ID NO: 25806 - protein, 8 aa, Artificial Sequence
  Synthetic construct
MQSVHLLT

SEQ ID NO: 25807 - protein, 8 aa, Artificial Sequence
  Synthetic construct
QQYGSSRT

SEQ ID NO: 25808 - protein, 9 aa, Artificial Sequence
  Synthetic construct
QQANSFPLT

SEQ ID NO: 25809 - protein, 10 aa, Artificial Sequence
  Synthetic construct
QQRSDWPPLT

SEQ ID NO: 25810 - protein, 10 aa, Artificial Sequence
  Synthetic construct
QRRSNWPPFT

SEQ ID NO: 25811 - protein, 9 aa, Artificial Sequence
  Synthetic construct
QQRQSWPPS

SEQ ID NO: 25812 - protein, 9 aa, Artificial Sequence
  Synthetic construct
QQYDTYPIT

SEQ ID NO: 25813 - protein, 9 aa, Artificial Sequence
  Synthetic construct
QQSYYTPPT

SEQ ID NO: 25814 - protein, 8 aa, Artificial Sequence
  Synthetic construct
CSYVGASL

SEQ ID NO: 25815 - protein, 10 aa, Artificial Sequence
  Synthetic construct
QQYGNSPKLT

SEQ ID NO: 25816 - protein, 12 aa, Artificial Sequence
  Synthetic construct
QSYDNTLSGPYV

SEQ ID NO: 25817 - protein, 10 aa, Artificial Sequence
  Synthetic construct
CSYADTNTLV

SEQ ID NO: 25818 - protein, 10 aa, Artificial Sequence
  Synthetic construct
QQYGNSPPYT

SEQ ID NO: 25819 - protein, 9 aa, Artificial Sequence
  Synthetic construct
QAWDSSTVV

SEQ ID NO: 25820 - protein, 11 aa, Artificial Sequence
  Synthetic construct
GTWDSSLSAWV

SEQ ID NO: 25821 - protein, 9 aa, Artificial Sequence
  Synthetic construct
QAWDSSTAV

SEQ ID NO: 25822 - protein, 11 aa, Artificial Sequence
  Synthetic construct
NSRDSSANHLV

SEQ ID NO: 25823 - protein, 11 aa, Artificial Sequence
  Synthetic construct
YSTDSSGNHRV

SEQ ID NO: 25824 - protein, 12 aa, Artificial Sequence
  Synthetic construct
QSYDSSLSGSKV

SEQ ID NO: 25825 - protein, 9 aa, Artificial Sequence
  Synthetic construct
QQYDNLPWS

SEQ ID NO: 25826 - protein, 11 aa, Artificial Sequence
  Synthetic construct
HRRSNWPPGLT

SEQ ID NO: 25827 - protein, 10 aa, Artificial Sequence
  Synthetic construct
CSYAGSYTAV

SEQ ID NO: 25828 - protein, 9 aa, Artificial Sequence
  Synthetic construct
MQALHFPYT

SEQ ID NO: 25829 - protein, 9 aa, Artificial Sequence
  Synthetic construct
QQYYSSPQT

SEQ ID NO: 25830 - protein, 9 aa, Artificial Sequence
  Synthetic construct
QKYDDWPPT

SEQ ID NO: 25831 - protein, 12 aa, Artificial Sequence
  Synthetic construct
AAWDDSLNGLWV

SEQ ID NO: 25832 - protein, 11 aa, Artificial Sequence
  Synthetic construct
QQRSNWPPRYT

SEQ ID NO: 25833 - protein, 9 aa, Artificial Sequence
  Synthetic construct
QQHYSTPYT

SEQ ID NO: 25834 - protein, 10 aa, Artificial Sequence
  Synthetic construct
SSYTSSSTLV

SEQ ID NO: 25835 - protein, 8 aa, Artificial Sequence
  Synthetic construct
QQYNSYWT

SEQ ID NO: 25836 - protein, 10 aa, Artificial Sequence
  Synthetic construct
TSYTSRTTVV

SEQ ID NO: 25837 - protein, 10 aa, Artificial Sequence
  Synthetic construct
SSYTSSSTLV

SEQ ID NO: 25838 - protein, 9 aa, Artificial Sequence
  Synthetic construct
SSYTSSSVI

SEQ ID NO: 25839 - protein, 10 aa, Artificial Sequence
  Synthetic construct
FSYTSRGTRV

SEQ ID NO: 25840 - protein, 11 aa, Artificial Sequence
  Synthetic construct
QSYDSGLSALV

SEQ ID NO: 25841 - protein, 10 aa, Artificial Sequence
  Synthetic construct
QQYNDWPFWT

SEQ ID NO: 25842 - protein, 9 aa, Artificial Sequence
  Synthetic construct
QAWDSSTYV

SEQ ID NO: 25843 - protein, 9 aa, Artificial Sequence
  Synthetic construct
MQGTHWPRT

SEQ ID NO: 25844 - protein, 9 aa, Artificial Sequence
  Synthetic construct
QQSHTTPHT

SEQ ID NO: 25845 - protein, 10 aa, Artificial Sequence
  Synthetic construct
SSYSRSGTLV

SEQ ID NO: 25846 - protein, 10 aa, Artificial Sequence
  Synthetic construct
YSIDSSGNPP

SEQ ID NO: 25847 - protein, 12 aa, Artificial Sequence
  Synthetic construct
SAWDDSLSGEWV

SEQ ID NO: 25848 - protein, 11 aa, Artificial Sequence
  Synthetic construct
AAWDDSLNGYV

SEQ ID NO: 25849 - protein, 11 aa, Artificial Sequence
  Synthetic construct
QHRNNWPPALT

SEQ ID NO: 25850 - protein, 11 aa, Artificial Sequence
  Synthetic construct
QSYDSSLSGVV

SEQ ID NO: 25851 - protein, 9 aa, Artificial Sequence
  Synthetic construct
QAWDSSTVV

SEQ ID NO: 25852 - protein, 9 aa, Artificial Sequence
  Synthetic construct
MQSIQLPYT

SEQ ID NO: 25853 - protein, 9 aa, Artificial Sequence
  Synthetic construct
CSYAGSSPV

SEQ ID NO: 25854 - protein, 9 aa, Artificial Sequence
  Synthetic construct
MQSIQPPLT

SEQ ID NO: 25855 - protein, 11 aa, Artificial Sequence
  Synthetic construct
CSYTGSRTFYV

SEQ ID NO: 25856 - protein, 12 aa, Artificial Sequence
  Synthetic construct
YSTDSSGNHRGV

SEQ ID NO: 25857 - protein, 8 aa, Artificial Sequence
  Synthetic construct
CPYADTWV

SEQ ID NO: 25858 - protein, 10 aa, Artificial Sequence
  Synthetic construct
QQYGSSPLYT

SEQ ID NO: 25859 - protein, 9 aa, Artificial Sequence
  Synthetic construct
QQYYTTPFT

SEQ ID NO: 25860 - protein, 9 aa, Artificial Sequence
  Synthetic construct
MQALQTPPT

SEQ ID NO: 25861 - protein, 9 aa, Artificial Sequence
  Synthetic construct
HQSSTLPLT

SEQ ID NO: 25862 - protein, 9 aa, Artificial Sequence
  Synthetic construct
QQYNSYPIT

SEQ ID NO: 25863 - protein, 11 aa, Artificial Sequence
  Synthetic construct
AAWDDSLNGYV

SEQ ID NO: 25864 - protein, 11 aa, Artificial Sequence
  Synthetic construct
ETWDTSLSVVL

SEQ ID NO: 25865 - protein, 11 aa, Artificial Sequence
  Synthetic construct
QQRSNWPPIFT

SEQ ID NO: 25866 - protein, 9 aa, Artificial Sequence
  Synthetic construct
QQYYKTPLT

SEQ ID NO: 25867 - protein, 11 aa, Artificial Sequence
  Synthetic construct
YSTDSSGNHRV

SEQ ID NO: 25868 - protein, 9 aa, Artificial Sequence
  Synthetic construct
QQYGSSPGT

SEQ ID NO: 25869 - protein, 8 aa, Artificial Sequence
  Synthetic construct
QHLNTYPL

SEQ ID NO: 25870 - protein, 9 aa, Artificial Sequence
  Synthetic construct
QQSGNSRLT

SEQ ID NO: 25871 - protein, 9 aa, Artificial Sequence
  Synthetic construct
LQHNSYPLT

SEQ ID NO: 25872 - protein, 9 aa, Artificial Sequence
  Synthetic construct
MQRLEFPFT

SEQ ID NO: 25873 - protein, 9 aa, Artificial Sequence
  Synthetic construct
QQSYSTRIT

SEQ ID NO: 25874 - protein, 12 aa, Artificial Sequence
  Synthetic construct
YSTDSSYDHGGV

SEQ ID NO: 25875 - protein, 10 aa, Artificial Sequence
  Synthetic construct
QQVNSFFRVT

SEQ ID NO: 25876 - protein, 8 aa, Artificial Sequence
  Synthetic construct
QQRSTALT

SEQ ID NO: 25877 - protein, 9 aa, Artificial Sequence
  Synthetic construct
QQYAFSPRT

SEQ ID NO: 25878 - protein, 11 aa, Artificial Sequence
  Synthetic construct
HQRSNWPPRFT

SEQ ID NO: 25879 - protein, 9 aa, Artificial Sequence
  Synthetic construct
MQALQTPYT

SEQ ID NO: 25880 - protein, 9 aa, Artificial Sequence
  Synthetic construct
QQYGTSPWT

SEQ ID NO: 25881 - protein, 10 aa, Artificial Sequence
  Synthetic construct
QQYYSSPPYS

SEQ ID NO: 25882 - protein, 9 aa, Artificial Sequence
  Synthetic construct
HQYGSSPFT

SEQ ID NO: 25883 - protein, 10 aa, Artificial Sequence
  Synthetic construct
AAWDDSLRGV

SEQ ID NO: 25884 - protein, 8 aa, Artificial Sequence
  Synthetic construct
QHYNNLPR

SEQ ID NO: 25885 - protein, 10 aa, Artificial Sequence
  Synthetic construct
QRRSNWPPFT

SEQ ID NO: 25886 - protein, 11 aa, Artificial Sequence
  Synthetic construct
QQRSSWPPKLS

SEQ ID NO: 25887 - protein, 9 aa, Artificial Sequence
  Synthetic construct
QQYGSSQGT

SEQ ID NO: 25888 - protein, 11 aa, Artificial Sequence
  Synthetic construct
QQRSSRPPTWT

SEQ ID NO: 25889 - protein, 11 aa, Artificial Sequence
  Synthetic construct
GTWDSSLSAVV

SEQ ID NO: 25890 - protein, 10 aa, Artificial Sequence
  Synthetic construct
SSYTSSSTLV

SEQ ID NO: 25891 - protein, 12 aa, Artificial Sequence
  Synthetic construct
SSTDISGNHMGV

SEQ ID NO: 25892 - protein, 9 aa, Artificial Sequence
  Synthetic construct
QQSYSTPHT

SEQ ID NO: 25893 - protein, 9 aa, Artificial Sequence
  Synthetic construct
QQSYSAPPT

SEQ ID NO: 25894 - protein, 11 aa, Artificial Sequence
  Synthetic construct
QSYDSSLSSLV

SEQ ID NO: 25895 - protein, 9 aa, Artificial Sequence
  Synthetic construct
QKYDDWPPT

SEQ ID NO: 25896 - protein, 10 aa, Artificial Sequence
  Synthetic construct
QHYYNWPPWT

SEQ ID NO: 25897 - protein, 9 aa, Artificial Sequence
  Synthetic construct
QQLNSYPRT

SEQ ID NO: 25898 - protein, 9 aa, Artificial Sequence
  Synthetic construct
QQYGSSPRT

SEQ ID NO: 25899 - protein, 10 aa, Artificial Sequence
  Synthetic construct
CSFAGRTTLV

SEQ ID NO: 25900 - protein, 11 aa, Artificial Sequence
  Synthetic construct
QSYDTSLSGSV

SEQ ID NO: 25901 - protein, 9 aa, Artificial Sequence
  Synthetic construct
LQYNSYPLT

SEQ ID NO: 25902 - protein, 12 aa, Artificial Sequence
  Synthetic construct
GTWDSSLSPRYV

SEQ ID NO: 25903 - protein, 10 aa, Artificial Sequence
  Synthetic construct
QQYGTSPGYT

SEQ ID NO: 25904 - protein, 9 aa, Artificial Sequence
  Synthetic construct
QQTYSHPFT

SEQ ID NO: 25905 - protein, 10 aa, Artificial Sequence
  Synthetic construct
QQTYSTHLNT

SEQ ID NO: 25906 - protein, 9 aa, Artificial Sequence
  Synthetic construct
MQGTHWPFT

SEQ ID NO: 25907 - protein, 11 aa, Artificial Sequence
  Synthetic construct
GAWDDSLNGWV

SEQ ID NO: 25908 - protein, 8 aa, Artificial Sequence
  Synthetic construct
MQALQTRT

SEQ ID NO: 25909 - protein, 9 aa, Artificial Sequence
  Synthetic construct
QQYYGTPYT

SEQ ID NO: 25910 - protein, 11 aa, Artificial Sequence
  Synthetic construct
AAWDGSLNGFV

SEQ ID NO: 25911 - protein, 11 aa, Artificial Sequence
  Synthetic construct
YSTDSSGNHWV

SEQ ID NO: 25912 - protein, 6 aa, Artificial Sequence
  Synthetic construct
QAWDYV

SEQ ID NO: 25913 - protein, 9 aa, Artificial Sequence
  Synthetic construct
MQSIQIPLT

SEQ ID NO: 25914 - protein, 10 aa, Artificial Sequence
  Synthetic construct
QQRSDWPPLT

SEQ ID NO: 25915 - protein, 10 aa, Artificial Sequence
  Synthetic construct
QQLNSYPEIT

SEQ ID NO: 25916 - protein, 11 aa, Artificial Sequence
  Synthetic construct
AAWDDSLSGYV

SEQ ID NO: 25917 - protein, 11 aa, Artificial Sequence
  Synthetic construct
QVWDSSGENCV

SEQ ID NO: 25918 - protein, 10 aa, Artificial Sequence
  Synthetic construct
QQRFNWPPLT

SEQ ID NO: 25919 - protein, 9 aa, Artificial Sequence
  Synthetic construct
QQSSTTPET

SEQ ID NO: 25920 - protein, 10 aa, Artificial Sequence
  Synthetic construct
QQYYSTSRYT

SEQ ID NO: 25921 - protein, 9 aa, Artificial Sequence
  Synthetic construct
HQYGSPTWT

SEQ ID NO: 25922 - protein, 8 aa, Artificial Sequence
  Synthetic construct
QQSYSPYT

SEQ ID NO: 25923 - protein, 11 aa, Artificial Sequence
  Synthetic construct
QVWDSSIDHYV

SEQ ID NO: 25924 - protein, 9 aa, Artificial Sequence
  Synthetic construct
QQYNSYPYT

SEQ ID NO: 25925 - protein, 9 aa, Artificial Sequence
  Synthetic construct
QQSYSILWT

SEQ ID NO: 25926 - protein, 11 aa, Artificial Sequence
  Synthetic construct
QVWGGSVEHPV

SEQ ID NO: 25927 - protein, 9 aa, Artificial Sequence
  Synthetic construct
LQDYNYPLT

SEQ ID NO: 25928 - protein, 9 aa, Artificial Sequence
  Synthetic construct
QAWDSSTFV

SEQ ID NO: 25929 - protein, 9 aa, Artificial Sequence
  Synthetic construct
QQSYSTPLT

SEQ ID NO: 25930 - protein, 10 aa, Artificial Sequence
  Synthetic construct
QQSSSTLMYT

SEQ ID NO: 25931 - protein, 9 aa, Artificial Sequence
  Synthetic construct
QQANTFPLT

SEQ ID NO: 25932 - protein, 10 aa, Artificial Sequence
  Synthetic construct
LLSYSGAPVV

SEQ ID NO: 25933 - protein, 9 aa, Artificial Sequence
  Synthetic construct
QQYNNWPWT

SEQ ID NO: 25934 - protein, 10 aa, Artificial Sequence
  Synthetic construct
ASYTNISTRV

SEQ ID NO: 25935 - protein, 9 aa, Artificial Sequence
  Synthetic construct
LQYNSYPLT

SEQ ID NO: 25936 - protein, 9 aa, Artificial Sequence
  Synthetic construct
QQYYNTPPT

SEQ ID NO: 25937 - protein, 10 aa, Artificial Sequence
  Synthetic construct
CSYAGSSTFV

SEQ ID NO: 25938 - protein, 9 aa, Artificial Sequence
  Synthetic construct
QQYDGTPYT

SEQ ID NO: 25939 - protein, 8 aa, Artificial Sequence
  Synthetic construct
QHYDNLPR

SEQ ID NO: 25940 - protein, 10 aa, Artificial Sequence
  Synthetic construct
QQYATSPGYT

SEQ ID NO: 25941 - protein, 10 aa, Artificial Sequence
  Synthetic construct
SSYTSSSTLL

SEQ ID NO: 25942 - protein, 8 aa, Artificial Sequence
  Synthetic construct
QVWDSTVV

SEQ ID NO: 25943 - protein, 9 aa, Artificial Sequence
  Synthetic construct
HQSSSLPLT

SEQ ID NO: 25944 - protein, 9 aa, Artificial Sequence
  Synthetic construct
QKYNSVPLT

SEQ ID NO: 25945 - protein, 10 aa, Artificial Sequence
  Synthetic construct
QTWDSSTAGV

SEQ ID NO: 25946 - protein, 9 aa, Artificial Sequence
  Synthetic construct
QQYNNWPWT

SEQ ID NO: 25947 - protein, 11 aa, Artificial Sequence
  Synthetic construct
QSADRSGSYWV

SEQ ID NO: 25948 - protein, 8 aa, Artificial Sequence
  Synthetic construct
QQYNNWWT

SEQ ID NO: 25949 - protein, 9 aa, Artificial Sequence
  Synthetic construct
LLSYNGAAV

SEQ ID NO: 25950 - protein, 10 aa, Artificial Sequence
  Synthetic construct
QQYGSSPMYT

SEQ ID NO: 25951 - protein, 9 aa, Artificial Sequence
  Synthetic construct
QQRNNWPPT

SEQ ID NO: 25952 - protein, 10 aa, Artificial Sequence
  Synthetic construct
CSYAGSSIVV

SEQ ID NO: 25953 - protein, 8 aa, Artificial Sequence
  Synthetic construct
QAWDSSVV

SEQ ID NO: 25954 - protein, 10 aa, Artificial Sequence [sequence omitted]

SEQ ID NO: 25955 - protein, 12 aa, Artificial Sequence
  Synthetic construct
SSYGGSNNFYVL

SEQ ID NO: 25956 - protein, 9 aa, Artificial Sequence
  Synthetic construct
SSYAGSSFV

SEQ ID NO: 25957 - protein, 9 aa, Artificial Sequence
  Synthetic construct
QQGNSFPYT

SEQ ID NO: 25958 - protein, 10 aa, Artificial Sequence
  Synthetic construct
CSYAGFSTWV

SEQ ID NO: 25959 - protein, 11 aa, Artificial Sequence
  Synthetic construct
QSYDSSLSGNV

SEQ ID NO: 25960 - protein, 8 aa, Artificial Sequence
  Synthetic construct
QQRNNRWT

SEQ ID NO: 25961 - protein, 9 aa, Artificial Sequence
  Synthetic construct
QQAYSFPVT

SEQ ID NO: 25962 - protein, 10 aa, Artificial Sequence
  Synthetic construct
QHFGSSPPFT

SEQ ID NO: 25963 - protein, 11 aa, Artificial Sequence
  Synthetic construct
QVWDGSGDHWV

SEQ ID NO: 25964 - protein, 9 aa, Artificial Sequence
  Synthetic construct
QQYGNSRLT

SEQ ID NO: 25965 - protein, 9 aa, Artificial Sequence
  Synthetic construct
QKYDDWPPT

SEQ ID NO: 25966 - protein, 9 aa, Artificial Sequence
  Synthetic construct
QQYGGSPWT

SEQ ID NO: 25967 - protein, 11 aa, Artificial Sequence
  Synthetic construct
QVWDSGSVFVL

SEQ ID NO: 25968 - protein, 13 aa, Artificial Sequence
  Synthetic construct
QSYDSSLSGSGWV

SEQ ID NO: 25969 - protein, 10 aa, Artificial Sequence
  Synthetic construct
QQSYSTLMYT

SEQ ID NO: 25970 - protein, 10 aa, Artificial Sequence
  Synthetic construct
NSFISSSTLV

SEQ ID NO: 25971 - protein, 9 aa, Artificial Sequence
  Synthetic construct
LQHNSYPRT

SEQ ID NO: 25972 - protein, 11 aa, Artificial Sequence
  Synthetic construct
QQRSNRPPTWT

SEQ ID NO: 25973 - protein, 9 aa, Artificial Sequence
  Synthetic construct
QQANSFPLT

SEQ ID NO: 25974 - protein, 11 aa, Artificial Sequence
  Synthetic construct
QVWDSSSDLWV

SEQ ID NO: 25975 - protein, 11 aa, Artificial Sequence
  Synthetic construct
YSADSSGNLWV

SEQ ID NO: 25976 - protein, 11 aa, Artificial Sequence
  Synthetic construct
QSYDSSLSGNV

SEQ ID NO: 25977 - protein, 8 aa, Artificial Sequence
  Synthetic construct
QQYGSSPT

SEQ ID NO: 25978 - protein, 9 aa, Artificial Sequence
  Synthetic construct
QQSYSTPWT

SEQ ID NO: 25979 - protein, 12 aa, Artificial Sequence
  Synthetic construct
QSYDSSLSGSWV

SEQ ID NO: 25980 - protein, 11 aa, Artificial Sequence
  Synthetic construct
ASWDDSLNGVV

SEQ ID NO: 25981 - protein, 9 aa, Artificial Sequence
  Synthetic construct
QQYGRSQGT

SEQ ID NO: 25982 - protein, 9 aa, Artificial Sequence
  Synthetic construct
HQSSSLPLT

SEQ ID NO: 25983 - protein, 9 aa, Artificial Sequence
  Synthetic construct
QQYSTTPWT

SEQ ID NO: 25984 - protein, 9 aa, Artificial Sequence
  Synthetic construct
MIWHTSAWV

SEQ ID NO: 25985 - protein, 10 aa, Artificial Sequence
  Synthetic construct
QHYYNWPPWT

SEQ ID NO: 25986 - protein, 12 aa, Artificial Sequence
  Synthetic construct
QSYDSSLSGLYV

SEQ ID NO: 25987 - protein, 11 aa, Artificial Sequence
  Synthetic construct
QSYDSSLIGSV

SEQ ID NO: 25988 - protein, 11 aa, Artificial Sequence
  Synthetic construct
NSRDSSGNPSV

SEQ ID NO: 25989 - protein, 9 aa, Artificial Sequence
  Synthetic construct
QQYGSSQGT

SEQ ID NO: 25990 - protein, 11 aa, Artificial Sequence
  Synthetic construct
QQRSNRPPTWT

SEQ ID NO: 25991 - protein, 10 aa, Artificial Sequence
  Synthetic construct
QQYNNWPLIT

SEQ ID NO: 25992 - protein, 10 aa, Artificial Sequence
  Synthetic construct
YSYAGFSTFV

SEQ ID NO: 25993 - protein, 11 aa, Artificial Sequence
  Synthetic construct
GAWDDSLNGYV

SEQ ID NO: 25994 - protein, 8 aa, Artificial Sequence
  Synthetic construct
MQGLQTRT

SEQ ID NO: 25995 - protein, 9 aa, Artificial Sequence
  Synthetic construct
MIWHTSAWV

SEQ ID NO: 25996 - protein, 7 aa, Artificial Sequence
  Synthetic construct
QQYNTWT

SEQ ID NO: 25997 - protein, 11 aa, Artificial Sequence
  Synthetic construct
GTWDNSLSAVV

SEQ ID NO: 25998 - protein, 10 aa, Artificial Sequence
  Synthetic construct
SSYTRSSTWV

SEQ ID NO: 25999 - protein, 12 aa, Artificial Sequence
  Synthetic construct
QSSDNSGTYNYV

SEQ ID NO: 26000 - protein, 10 aa, Artificial Sequence
  Synthetic construct
QQYYGTPLWT

SEQ ID NO: 26001 - protein, 9 aa, Artificial Sequence
  Synthetic construct
QQYGSSPWT

SEQ ID NO: 26002 - protein, 8 aa, Artificial Sequence
  Synthetic construct
CSHTGTWV

SEQ ID NO: 26003 - protein, 9 aa, Artificial Sequence
  Synthetic construct
QQYGSSPWT

SEQ ID NO: 26004 - protein, 10 aa, Artificial Sequence
  Synthetic construct
CSYAGSSTYV

SEQ ID NO: 26005 - protein, 9 aa, Artificial Sequence
  Synthetic construct
HQYGSSPWT

SEQ ID NO: 26006 - protein, 13 aa, Artificial Sequence
  Synthetic construct
AAWDDSLSGPYWV

SEQ ID NO: 26007 - protein, 9 aa, Artificial Sequence
  Synthetic construct
QQAHSFPPT

SEQ ID NO: 26008 - protein, 8 aa, Artificial Sequence
  Synthetic construct
QQYNSYWT

SEQ ID NO: 26009 - protein, 9 aa, Artificial Sequence
  Synthetic construct
HQSSTVPYT

SEQ ID NO: 26010 - protein, 8 aa, Artificial Sequence
  Synthetic construct
QVWDSSVV

SEQ ID NO: 26011 - protein, 9 aa, Artificial Sequence
  Synthetic construct
QQYNNWPLT

SEQ ID NO: 26012 - protein, 7 aa, Artificial Sequence
  Synthetic construct
QQLNSYI

SEQ ID NO: 26013 - protein, 9 aa, Artificial Sequence
  Synthetic construct
QQYYNTPPT

SEQ ID NO: 26014 - protein, 10 aa, Artificial Sequence
  Synthetic construct
QSADSSGTVV

SEQ ID NO: 26015 - protein, 11 aa, Artificial Sequence
  Synthetic construct
QSIDSSGPYWV

SEQ ID NO: 26016 - protein, 10 aa, Artificial Sequence
  Synthetic construct
FSYTSRGTRV

SEQ ID NO: 26017 - protein, 8 aa, Artificial Sequence
  Synthetic construct
QQYNNWWT

SEQ ID NO: 26018 - protein, 9 aa, Artificial Sequence
  Synthetic construct
QHYGSSPIT

SEQ ID NO: 26019 - protein, 6 aa, Artificial Sequence
  Synthetic construct
QYYGRT

SEQ ID NO: 26020 - protein, 9 aa, Artificial Sequence
  Synthetic construct
MQALESPLT

SEQ ID NO: 26021 - protein, 11 aa, Artificial Sequence
  Synthetic construct
QSADSSGPYWV

SEQ ID NO: 26022 - protein, 12 aa, Artificial Sequence
  Synthetic construct
GTWDTSLSAPWV

SEQ ID NO: 26023 - protein, 9 aa, Artificial Sequence
  Synthetic construct
QQSFSTPPT

SEQ ID NO: 26024 - protein, 9 aa, Artificial Sequence
  Synthetic construct
MQALQTPWT

SEQ ID NO: 26025 - protein, 9 aa, Artificial Sequence
  Synthetic construct
QQSYSAPYT

SEQ ID NO: 26026 - protein, 8 aa, Artificial Sequence
  Synthetic construct
QHYDDLPR

SEQ ID NO: 26027 - protein, 6 aa, Artificial Sequence
  Synthetic construct
QQRSSS

SEQ ID NO: 26028 - protein, 12 aa, Artificial Sequence
  Synthetic construct
GTWDSSLSAAWV

SEQ ID NO: 26029 - protein, 9 aa, Artificial Sequence
  Synthetic construct
QAWASSTGV

SEQ ID NO: 26030 - protein, 9 aa, Artificial Sequence
  Synthetic construct
MQSLQFPLT

SEQ ID NO: 26031 - protein, 10 aa, Artificial Sequence
  Synthetic construct
TSYTDLSTAI

SEQ ID NO: 26032 - protein, 9 aa, Artificial Sequence
  Synthetic construct
QQSYSIPYT

SEQ ID NO: 26033 - protein, 10 aa, Artificial Sequence
  Synthetic construct
MQALQTPRYT

SEQ ID NO: 26034 - protein, 10 aa, Artificial Sequence
  Synthetic construct
LQYNYYPLVT

SEQ ID NO: 26035 - protein, 9 aa, Artificial Sequence
  Synthetic construct
QHYDNLRWT

SEQ ID NO: 26036 - protein, 9 aa, Artificial Sequence
  Synthetic construct
SSYTSSSVV

SEQ ID NO: 26037 - protein, 11 aa, Artificial Sequence
  Synthetic construct
QVWDSSSDHYV

SEQ ID NO: 26038 - protein, 9 aa, Artificial Sequence
  Synthetic construct
QQAHSFPYT

SEQ ID NO: 26039 - protein, 9 aa, Artificial Sequence
  Synthetic construct
MQALQTPWT

SEQ ID NO: 26040 - protein, 8 aa, Artificial Sequence
  Synthetic construct
QHYDNLPR

SEQ ID NO: 26041 - protein, 10 aa, Artificial Sequence
  Synthetic construct
SSYTISSTLV

SEQ ID NO: 26042 - protein, 11 aa, Artificial Sequence
  Synthetic construct
HHRSNWPPLLT

SEQ ID NO: 26043 - protein, 8 aa, Artificial Sequence
  Synthetic construct
QHYDNLPR

SEQ ID NO: 26044 - protein, 10 aa, Artificial Sequence
  Synthetic construct
SSYTSSSTWV

SEQ ID NO: 26045 - protein, 11 aa, Artificial Sequence
  Synthetic construct
QSYDNSLSASV

SEQ ID NO: 26046 - protein, 9 aa, Artificial Sequence
  Synthetic construct
QQYGGPTWT

SEQ ID NO: 26047 - protein, 10 aa, Artificial Sequence
  Synthetic construct
NSYTSSSTWV

SEQ ID NO: 26048 - protein, 9 aa, Artificial Sequence
  Synthetic construct
QAWDSSNVV

SEQ ID NO: 26049 - protein, 9 aa, Artificial Sequence
  Synthetic construct
QQFHSLPLT

SEQ ID NO: 26050 - protein, 9 aa, Artificial Sequence
  Synthetic construct
QQTYYTFFT

SEQ ID NO: 26051 - protein, 10 aa, Artificial Sequence
  Synthetic construct
CSYAGTYSVV

SEQ ID NO: 26052 - protein, 11 aa, Artificial Sequence
  Synthetic construct
QQRRNWPPRYT

SEQ ID NO: 26053 - protein, 10 aa, Artificial Sequence
  Synthetic construct
QQTYIAPGWT

SEQ ID NO: 26054 - protein, 11 aa, Artificial Sequence
  Synthetic construct
AAWDDSLNGYV

SEQ ID NO: 26055 - protein, 10 aa, Artificial Sequence
  Synthetic construct
LQYNFYPLVT

SEQ ID NO: 26056 - protein, 9 aa, Artificial Sequence
  Synthetic construct
QQYNTYPIT

SEQ ID NO: 26057 - protein, 9 aa, Artificial Sequence
  Synthetic construct
QQLNSYPQT

SEQ ID NO: 26058 - protein, 12 aa, Artificial Sequence
  Synthetic construct
YSTDSSDNHKGV

SEQ ID NO: 26059 - protein, 9 aa, Artificial Sequence
  Synthetic construct
MQSIQLPLT

SEQ ID NO: 26060 - protein, 9 aa, Artificial Sequence
  Synthetic construct
QQYNNWPYT

SEQ ID NO: 26061 - protein, 9 aa, Artificial Sequence
  Synthetic construct
QHYGSSPYT

SEQ ID NO: 26062 - protein, 11 aa, Artificial Sequence
  Synthetic construct
YSTGSSGNHRV

SEQ ID NO: 26063 - protein, 10 aa, Artificial Sequence
  Synthetic construct
QRRSNWPPFT

SEQ ID NO: 26064 - protein, 10 aa, Artificial Sequence
  Synthetic construct
AAWDDSLNKV

SEQ ID NO: 26065 - protein, 9 aa, Artificial Sequence
  Synthetic construct
QQYGSSPLT

SEQ ID NO: 26066 - protein, 13 aa, Artificial Sequence
  Synthetic construct
QVWDSSSDHAGVV

SEQ ID NO: 26067 - protein, 11 aa, Artificial Sequence
  Synthetic construct
KSRDSSGNHLV

SEQ ID NO: 26068 - protein, 8 aa, Artificial Sequence
  Synthetic construct
QQYNNWLT

SEQ ID NO: 26069 - protein, 9 aa, Artificial Sequence
  Synthetic construct
QQYNSYSRT

SEQ ID NO: 26070 - protein, 11 aa, Artificial Sequence
  Synthetic construct
YSTGSSGNHRV

SEQ ID NO: 26071 - protein, 9 aa, Artificial Sequence
  Synthetic construct
QQSYSTPLT

SEQ ID NO: 26072 - protein, 11 aa, Artificial Sequence
  Synthetic construct
QQRNNWPPRIT

SEQ ID NO: 26073 - protein, 10 aa, Artificial Sequence
  Synthetic construct
QQYGSSPMYT

SEQ ID NO: 26074 - protein, 9 aa, Artificial Sequence
  Synthetic construct
HQSSSLPLT

SEQ ID NO: 26075 - protein, 10 aa, Artificial Sequence
  Synthetic construct
HSRDSSGNPL

SEQ ID NO: 26076 - protein, 8 aa, Artificial Sequence
  Synthetic construct
MQSIQLIT

SEQ ID NO: 26077 - protein, 9 aa, Artificial Sequence
  Synthetic construct
YSTDRSGRV

SEQ ID NO: 26078 - protein, 8 aa, Artificial Sequence
  Synthetic construct
QQYYSTPT

SEQ ID NO: 26079 - protein, 9 aa, Artificial Sequence
  Synthetic construct
MQALHFPYT

SEQ ID NO: 26080 - protein, 11 aa, Artificial Sequence
  Synthetic construct
QYRSNWPPRYT

SEQ ID NO: 26081 - protein, 10 aa, Artificial Sequence
  Synthetic construct
FSYAGSSTYV

SEQ ID NO: 26082 - protein, 9 aa, Artificial Sequence
  Synthetic construct
HQSSSLPWT

SEQ ID NO: 26083 - protein, 10 aa, Artificial Sequence
  Synthetic construct
SSYTSSSTYV

SEQ ID NO: 26084 - protein, 11 aa, Artificial Sequence
  Synthetic construct
QVWDSSSDHRV

SEQ ID NO: 26085 - protein, 13 aa, Artificial Sequence
  Synthetic construct
QVWDSSSDHSHVV

SEQ ID NO: 26086 - protein, 8 aa, Artificial Sequence
  Synthetic construct
QHYDNLPR

SEQ ID NO: 26087 - protein, 8 aa, Artificial Sequence
  Synthetic construct
QVWDSSVV

SEQ ID NO: 26088 - protein, 9 aa, Artificial Sequence
  Synthetic construct
VQQNSFPYS

SEQ ID NO: 26089 - protein, 8 aa, Artificial Sequence
  Synthetic construct
QVWDSGWV

SEQ ID NO: 26090 - protein, 8 aa, Artificial Sequence
  Synthetic construct
QQYNSYSA

SEQ ID NO: 26091 - protein, 12 aa, Artificial Sequence
  Synthetic construct
QSADSSGPYPYV

SEQ ID NO: 26092 - protein, 14 aa, Artificial Sequence
  Synthetic construct
YSYAGAGSGGSSWV

SEQ ID NO: 26093 - protein, 9 aa, Artificial Sequence
  Synthetic construct
QQYDNPLFT

SEQ ID NO: 26094 - protein, 11 aa, Artificial Sequence
  Synthetic construct
QHRSNWPPALT

SEQ ID NO: 26095 - protein, 11 aa, Artificial Sequence
  Synthetic construct
YSTDTSGNRRV

SEQ ID NO: 26096 - protein, 9 aa, Artificial Sequence
  Synthetic construct
QQSYSTPFT

SEQ ID NO: 26097 - protein, 12 aa, Artificial Sequence
  Synthetic construct
AAWDDSLSGSWV

SEQ ID NO: 26098 - protein, 10 aa, Artificial Sequence
  Synthetic construct
QQRSNWPPFT

SEQ ID NO: 26099 - protein, 9 aa, Artificial Sequence
  Synthetic construct
QQYDRSSYT

SEQ ID NO: 26100 - protein, 11 aa, Artificial Sequence
  Synthetic construct
YSTDSSGNHWV

SEQ ID NO: 26101 - protein, 9 aa, Artificial Sequence
  Synthetic construct
QQSYSSPWT

SEQ ID NO: 26102 - protein, 13 aa, Artificial Sequence
  Synthetic construct
SSYTSSSTLDFYV

SEQ ID NO: 26103 - protein, 9 aa, Artificial Sequence
  Synthetic construct
MQSIELPYT

SEQ ID NO: 26104 - protein, 9 aa, Artificial Sequence
  Synthetic construct
QQYDNLPPA

SEQ ID NO: 26105 - protein, 9 aa, Artificial Sequence
  Synthetic construct
QQYYSTPLT

SEQ ID NO: 26106 - protein, 9 aa, Artificial Sequence
  Synthetic construct
MEALQTPFT

SEQ ID NO: 26107 - protein, 8 aa, Artificial Sequence
  Synthetic construct
QHLNSYPL

SEQ ID NO: 26108 - protein, 10 aa, Artificial Sequence
  Synthetic construct
SSYAGSNNLR

SEQ ID NO: 26109 - protein, 11 aa, Artificial Sequence
  Synthetic construct
QSYDSSLSGVV

SEQ ID NO: 26110 - protein, 9 aa, Artificial Sequence
  Synthetic construct
QQYYHTAWT

SEQ ID NO: 26111 - protein, 9 aa, Artificial Sequence
  Synthetic construct
HQYHTYSCT

SEQ ID NO: 26112 - protein, 11 aa, Artificial Sequence
  Synthetic construct
AAWDDSLSAWV

SEQ ID NO: 26113 - protein, 10 aa, Artificial Sequence
  Synthetic construct
NSYTTGGTRL

SEQ ID NO: 26114 - protein, 9 aa, Artificial Sequence
  Synthetic construct
QQANSFPFT

SEQ ID NO: 26115 - protein, 14 aa, Artificial Sequence
  Synthetic construct
SSYTSNNTLEGGYV

SEQ ID NO: 26116 - protein, 8 aa, Artificial Sequence
  Synthetic construct
LQHNSYLT

SEQ ID NO: 26117 - protein, 8 aa, Artificial Sequence
  Synthetic construct
QQYGSSFT

SEQ ID NO: 26118 - protein, 8 aa, Artificial Sequence
  Synthetic construct
QQYNNWWT

SEQ ID NO: 26119 - protein, 11 aa, Artificial Sequence
  Synthetic construct
YSTDSSGHQGV

SEQ ID NO: 26120 - protein, 11 aa, Artificial Sequence
  Synthetic construct
GTWDNSLNVVL

SEQ ID NO: 26121 - protein, 9 aa, Artificial Sequence
  Synthetic construct
LLYYVGTPV

SEQ ID NO: 26122 - protein, 11 aa, Artificial Sequence
  Synthetic construct
QVWDSTTKHYV

SEQ ID NO: 26123 - protein, 8 aa, Artificial Sequence
  Synthetic construct
CAYVGASL

SEQ ID NO: 26124 - protein, 10 aa, Artificial Sequence
  Synthetic construct
QQYNNWPFWT

SEQ ID NO: 26125 - protein, 5 aa, Artificial Sequence
  Synthetic construct
QQRYA

SEQ ID NO: 26126 - protein, 9 aa, Artificial Sequence
  Synthetic construct
MQALQTPRT

SEQ ID NO: 26127 - protein, 18 aa, Artificial Sequence
  Synthetic construct
SSFAAITSSSATVTTSVI

SEQ ID NO: 26128 - protein, 10 aa, Artificial Sequence
  Synthetic construct
QQYYSTPMYT

SEQ ID NO: 26129 - protein, 10 aa, Artificial Sequence
  Synthetic construct
QQYNNWPPLT

SEQ ID NO: 26130 - protein, 11 aa, Artificial Sequence
  Synthetic construct
AAWDDSLSAWV

SEQ ID NO: 26131 - protein, 11 aa, Artificial Sequence
  Synthetic construct
QSYDSSLSGYV

SEQ ID NO: 26132 - protein, 8 aa, Artificial Sequence
  Synthetic construct
QHYDNLPR

SEQ ID NO: 26133 - protein, 9 aa, Artificial Sequence
  Synthetic construct
QQSYRTPPT

SEQ ID NO: 26134 - protein, 11 aa, Artificial Sequence
  Synthetic construct
EAWDDSLNGPV

SEQ ID NO: 26135 - protein, 10 aa, Artificial Sequence
  Synthetic construct
QSADSSGTWV

SEQ ID NO: 26136 - protein, 10 aa, Artificial Sequence
  Synthetic construct
QQRSNWPPWT

SEQ ID NO: 26137 - protein, 9 aa, Artificial Sequence
  Synthetic construct
MIWHITAAV

SEQ ID NO: 26138 - protein, 9 aa, Artificial Sequence
  Synthetic construct
QQYNSWPYT

SEQ ID NO: 26139 - protein, 9 aa, Artificial Sequence
  Synthetic construct
HQSSTLPLT

SEQ ID NO: 26140 - protein, 9 aa, Artificial Sequence
  Synthetic construct
IQSIQLPLT

SEQ ID NO: 26141 - protein, 128 aa, Artificial Sequence
  Synthetic construct
QVQLQESGPGVVKPSETLSLTCSVSGGSISSTNYYWAWIRQPPGKGLEWIGSIFYTGSTYYNPSLKSRVIISVDTSKNQFSLRLTSVTAADTAVYYCARYTSYYDRSGFRRVEYFQHWGQGTLVTVSS

SEQ ID NO: 26142 - protein, 127 aa, Artificial Sequence
  Synthetic construct
EVLLVESGGGLVKPGGSLRLSCAASGFSFSSYNMNWVRQAPGKGLEWVSSISSSSNYIYYADSVKGRFTISRDNAKNSLYLQMNSLRAEDTAVYYCANMRTNYDIFTGYYPDAFDIWGQGTMVTVSS

SEQ ID NO: 26143 - protein, 116 aa, Artificial Sequence
  Synthetic construct
EVQLVDSGGGLVQPGGSLRVSCAASGFTVSSNHMSWVRQAPGKGLEWVSLIYGDGSTHYADSVKGRFTMSRDKSKNTLYLQMNSLRAEDTAVYYCARDVTHAFDLWGQGTMVTVSS

SEQ ID NO: 26144 - protein, 128 aa, Artificial Sequence
  Synthetic construct
QVQLQESGPGLVKPSETLSLTCSVSNYSISSGYYWGWIRQPPGKGLEWIGSIFHSGSTYYNPSLKGRVTISVDRSKNQFSLKLTSVTAADTAVYLCAKEGARGRGATTSFYYYYMDVWGKGTTVTVSS

SEQ ID NO: 26145 - protein, 123 aa, Artificial Sequence
  Synthetic construct
QVQLLESGGGVVQPGRSLRLSCAVSGFTFSSYGMHWVRQAPGKGLEWVTFISYDGSNEYYADSVKGRFTISRDSSKNTLYLQMNSLRPEDTAVYYCAKSEYSYAYKVHFLDYWGQGTLVTVSS

SEQ ID NO: 26146 - protein, 128 aa, Artificial Sequence
  Synthetic construct
QVQLQESGPGLVKPSQSLSLTCNVSGGSISSNNYYWNWIRQPAGKGLEWIGRGYSSGSTNYNPSLKSRLTISLDTSKNQFSLKLSSVTAADTAVYYCARSTYYYDRSGYSTSDGMDVWGQGTTVIVSS

SEQ ID NO: 26147 - protein, 117 aa, Artificial Sequence
  Synthetic construct
QVQLQQWGAGLLKPSETLSLTCAVYGGSFSASYWSWIRQPPGKGLEWIGEIHHSGSTNYNPSLESRVTISVDTSKNQFSLKLSSVTATDTAVYYCAREYSSTVWDNWGQGTLVTVSS

SEQ ID NO: 26148 - protein, 129 aa, Artificial Sequence
  Synthetic construct
QVQLVQSGAEVKKPGASVKVSCKASGYIFTSYDLHWVRQAPGQRLEWMGWINVGNGNTKYSQKFLGRVTFTRDTSASTVYMELSSLRSEDTAMYYCARPPRGYYDRTGYYNVVHYFQHWGQGTLVTVSS

SEQ ID NO: 26149 - protein, 129 aa, Artificial Sequence
  Synthetic construct
QVQLVQSGAEVKKPGASVKVSCKASGYTFTSYAMHWVRQAPGQRLEWMGWINAGNGDTKYSQKFQGRVTITRDTSASTAYMELRSLRSEDTAVYYCARPPRGYYDRSGYYNVLLYFQHWGQGTLVTVSS

SEQ ID NO: 26150 - protein, 117 aa, Artificial Sequence
  Synthetic construct
QVQLVQSGSELKKPGASVKVSCKASRYAFTTYAIHWVRQAPGQGLEWMGWINTNTGDPMYAHGFTGRFVFSLATSVSTAYLEISSLKAEDTAVYYCAREDTFYFDYWGQGTLVTVSS

SEQ ID NO: 26151 - protein, 120 aa, Artificial Sequence
  Synthetic construct
QVQLVQSGAEVKKPGASVKISCKPSGYTFTNYLIQWVRQAPGQSLEWMGWINAGDGYSKNSLSFRGRVTFTRDTSASTASMELSSLNSEDTAVYYCARGGFNYGHGLDYWGQGTLVTVSS

SEQ ID NO: 26152 - protein, 124 aa, Artificial Sequence
  Synthetic construct
EVQLVESGGGLVQPGGSLRLSCAASGFTFSSYAMSWVRQAPGKGLEWVSAISGSGFNTNYADSVKGRFTISRDNSKNTLYLQMNSLRAEDTAVYYCAKYGWGLLAAAGDAFDIWGQGTMVTVSS

SEQ ID NO: 26153 - protein, 119 aa, Artificial Sequence
  Synthetic construct
QVQLQESGPGLVKPSETLSLTCIVSDDSINSYYWSWIRQPPGRGLEWIGYIYYSGSTNYDPSLKSRATISLDTSKNQLSLKLTSVTAADTAVYYCARSGSYGDRTFDHWGQGTLVTVSS

SEQ ID NO: 26154 - protein, 108 aa, Artificial Sequence
  Synthetic construct
EIVLTQSPGTLSLSPGERATLSCRASQSVSSSYLAWYQQKPGQAPSLLISGSSSRATDIPDRFSGSGSGTDFTLTISRLEPEDFAVYFCQQYGSSPYTFGQGTKLEIK

SEQ ID NO: 26155 - protein, 108 aa, Artificial Sequence
  Synthetic construct
EIVMTQSPATLSVSPGERATLSCSASQSVSSNLAWYQQKPGQAPRLLIYGASTRATGIPARFSGSGSGTEFTLTISSLESEDFAVYYCQQYYNWPPWTFGQGTKVEIK

SEQ ID NO: 26156 - protein, 107 aa, Artificial Sequence
  Synthetic construct
DIQMTQSPSTLSASVGDRVTITCRASQIIGMWLAWYQQKPGKAPKLLIYKASSLEYGVPSRFSGSGSGTEFTLTISSLQPDDFATYYCQQYNSDLYTFGQGTKLEIK

SEQ ID NO: 26157 - protein, 111 aa, Artificial Sequence
  Synthetic construct
QSVLTQPPSVSGAPGQRVTISCTGSSSNIGAGHDVHWYQQLPGTAPKLLIYGNTNRPSGVPDRVSGSKSGTSASLAISGLQAEDEADYYCQSYDISLNGWVLGGGTKLTVL

SEQ ID NO: 26158 - protein, 111 aa, Artificial Sequence
  Synthetic construct
NFMLTQPHSVSESPGKTVTISCTGSSGSIASNSVQWYQQRPGSAPTTVIYEDNQRPSWVPDRFSGSIDSSSNSASLTISGLKAEDESDYYCQSYDSSNHVLFGGGTKLTVL

SEQ ID NO: 26159 - protein, 107 aa, Artificial Sequence
  Synthetic construct
EIVLTQSPGTLSLSPGERVTLSCRASQSVSNSLAWYQQKPGQAPRLLIDGASSRATGIPDRFSGSGSETDFTLTISRLEPEDFAVYYCQQYGSSPLTFGGGTKVEIK

SEQ ID NO: 26160 - protein, 111 aa, Artificial Sequence
  Synthetic construct
QSALTQPASVSGSPGQSITISCTGTSSDVGRHNYVSWYQQYPGKAPKLMIYDVSNRPSGVSNRFSGSKSGNTASLTISGLQAEDEADYYCSSYTSSSAYVVFGGGTKLTVL

SEQ ID NO: 26161 - protein, 107 aa, Artificial Sequence; identical to SEQ ID NO: 2682
  Synthetic construct

SEQ ID NO: 26162 - protein, 107 aa, Artificial Sequence
  Synthetic construct
DIQMTQSPSSLSASVGDRVTITCQASQDISNYLNWYQQKPGKAPKLLIYDASNLETGVPSRFSGSGSGTDFTFTINSLQPEDIATYYCQQYVNLPLTFGGGTKVEIK

SEQ ID NO: 26163 - protein, 107 aa, Artificial Sequence
  Synthetic construct
ESVLTQSPGTLALSPGERATLSCRASQSVGSRYLAWYQQKPGQAPRVLIYGASSRATGIPDRFSGSGSGTDFTLTISRLEPEDFAVYYCQQYGTSPSFGQGTRLEIK

SEQ ID NO: 26164 - protein, 111 aa, Artificial Sequence
  Synthetic construct
QSALTQPPSASGSPGQSVTISCTGTSSDVGGYNYVFWYQQHSGKAPKLMIYEVNKRPSGVPDRFSGSKSGNTASLTVSGLQAEDEADYYCSSYAGVTNNLIFGGGTKLTVL

SEQ ID NO: 26165 - protein, 112 aa, Artificial Sequence
  Synthetic construct
DVVLIQSPLSLPVTLGQPASISCRSSQSLVYGDGDTYLNWFQQRPGQSPRRLIYKVSNRDSGVPDRFSGSGSGTDFTLKISRVEAEDVGVYYCMQGTHWPRTFGQGTKVEIK

SEQ ID NO: 26166 - protein, 106 aa, Artificial Sequence
  Synthetic construct
SYELTQPPSVSVSPGQTATITCSGDKLGDKYACWFQQKPGQSPVLVIYHDTKRPSGIPERFSGSNSGNTATLTISGTQAMDEADYYCQAWGSSTAVFGTGTKVTVL

SEQ ID NO: 26167 - protein, 10 aa, Artificial Sequence
  Synthetic construct
GGSISSTNYY

SEQ ID NO: 26168 - protein, 8 aa, Artificial Sequence
  Synthetic construct
GFSFSSYN

SEQ ID NO: 26169 - protein, 8 aa, Artificial Sequence
  Synthetic construct
GFTVSSNH

SEQ ID NO: 26170 - protein, 9 aa, Artificial Sequence
  Synthetic construct
NYSISSGYY

SEQ ID NO: 26171 - protein, 8 aa, Artificial Sequence
  Synthetic construct
GFTFSSYG

SEQ ID NO: 26172 - protein, 10 aa, Artificial Sequence
  Synthetic construct
GGSISSNNYY

SEQ ID NO: 26173 - protein, 8 aa, Artificial Sequence
  Synthetic construct
GGSFSASY

SEQ ID NO: 26174 - protein, 8 aa, Artificial Sequence
  Synthetic construct
GYIFTSYD

SEQ ID NO: 26175 - protein, 8 aa, Artificial Sequence
  Synthetic construct
GYTFTSYA

SEQ ID NO: 26176 - protein, 8 aa, Artificial Sequence
  Synthetic construct
RYAFTTYA

SEQ ID NO: 26177 - protein, 8 aa, Artificial Sequence
  Synthetic construct
GYTFTNYL

SEQ ID NO: 26178 - protein, 8 aa, Artificial Sequence
  Synthetic construct
GFTFSSYA

SEQ ID NO: 26179 - protein, 8 aa, Artificial Sequence
  Synthetic construct
DDSINSYY

SEQ ID NO: 26180 - protein, 7 aa, Artificial Sequence
  Synthetic construct
IFYTGST

SEQ ID NO: 26181 - protein, 8 aa, Artificial Sequence
  Synthetic construct
ISSSSNYI

SEQ ID NO: 26182 - protein, 7 aa, Artificial Sequence
  Synthetic construct
IYGDGST

SEQ ID NO: 26183 - protein, 7 aa, Artificial Sequence
  Synthetic construct
IFHSGST

SEQ ID NO: 26184 - protein, 8 aa, Artificial Sequence
  Synthetic construct
ISYDGSNE

SEQ ID NO: 26185 - protein, 7 aa, Artificial Sequence
  Synthetic construct
GYSSGST

SEQ ID NO: 26186 - protein, 7 aa, Artificial Sequence
  Synthetic construct
IHHSGST

SEQ ID NO: 26187 - protein, 8 aa, Artificial Sequence
  Synthetic construct
INVGNGNT

SEQ ID NO: 26188 - protein, 8 aa, Artificial Sequence
  Synthetic construct
INAGNGDT

SEQ ID NO: 26189 - protein, 8 aa, Artificial Sequence
  Synthetic construct
INTNTGDP

SEQ ID NO: 26190 - protein, 8 aa, Artificial Sequence
  Synthetic construct
INAGDGYS

SEQ ID NO: 26191 - protein, 8 aa, Artificial Sequence
  Synthetic construct
ISGSGFNT

SEQ ID NO: 26192 - protein, 7 aa, Artificial Sequence
  Synthetic construct
IYYSGST

SEQ ID NO: 26193 - protein, 20 aa, Artificial Sequence
  Synthetic construct
ARYTSYYDRSGFRRVEYFQH

SEQ ID NO: 26194 - protein, 20 aa, Artificial Sequence
  Synthetic construct
ANMRTNYDIFTGYYPDAFDI

SEQ ID NO: 26195 - protein, 10 aa, Artificial Sequence
  Synthetic construct
ARDVTHAFDL

SEQ ID NO: 26196 - protein, 21 aa, Artificial Sequence
  Synthetic construct
AKEGARGRGATTSFYYYYMDV

SEQ ID NO: 26197 - protein, 16 aa, Artificial Sequence
  Synthetic construct
AKSEYSYAYKVHFLDY

SEQ ID NO: 26198 - protein, 20 aa, Artificial Sequence
  Synthetic construct
ARSTYYYDRSGYSTSDGMDV

SEQ ID NO: 26199 - protein, 11 aa, Artificial Sequence
  Synthetic construct
AREYSSTVWDN

SEQ ID NO: 26200 - protein, 22 aa, Artificial Sequence
  Synthetic construct
ARPPRGYYDRTGYYNVVHYFQH

SEQ ID NO: 26201 - protein, 22 aa, Artificial Sequence
  Synthetic construct
ARPPRGYYDRSGYYNVLLYFQH

SEQ ID NO: 26202 - protein, 10 aa, Artificial Sequence
  Synthetic construct
AREDTFYFDY

SEQ ID NO: 26203 - protein, 13 aa, Artificial Sequence
  Synthetic construct
ARGGFNYGHGLDY

SEQ ID NO: 26204 - protein, 17 aa, Artificial Sequence
  Synthetic construct
AKYGWGLLAAAGDAFDI

SEQ ID NO: 26205 - protein, 13 aa, Artificial Sequence
  Synthetic construct
ARSGSYGDRTFDH

SEQ ID NO: 26206 - protein, 7 aa, Artificial Sequence
  Synthetic construct
QSVSSSY

SEQ ID NO: 26207 - protein, 6 aa, Artificial Sequence
  Synthetic construct
QSVSSN

SEQ ID NO: 26208 - protein, 6 aa, Artificial Sequence
  Synthetic construct
QIIGMW

SEQ ID NO: 26209 - protein, 9 aa, Artificial Sequence
  Synthetic construct
SSNIGAGHD

SEQ ID NO: 26210 - protein, 8 aa, Artificial Sequence
  Synthetic construct
SGSIASNS

SEQ ID NO: 26211 - protein, 6 aa, Artificial Sequence
  Synthetic construct
QSVSNS

SEQ ID NO: 26212 - protein, 9 aa, Artificial Sequence
  Synthetic construct
SSDVGRHNY

SEQ ID NO: 26213 - protein, 6 aa, Artificial Sequence
  Synthetic construct
QDISNY

SEQ ID NO: 26214 - protein, 6 aa, Artificial Sequence
  Synthetic construct
QDISNY

SEQ ID NO: 26215 - protein, 7 aa, Artificial Sequence
  Synthetic construct
QSVGSRY

SEQ ID NO: 26216 - protein, 9 aa, Artificial Sequence
  Synthetic construct
SSDVGGYNY

SEQ ID NO: 26217 - protein, 11 aa, Artificial Sequence
  Synthetic construct
QSLVYGDGDTY

SEQ ID NO: 26218 - protein, 6 aa, Artificial Sequence
  Synthetic construct
KLGDKY

SEQ ID NO: 26219 - protein, 3 aa, Artificial Sequence
  Synthetic construct
GSS

SEQ ID NO: 26220 - protein, 3 aa, Artificial Sequence
  Synthetic construct
GAS

SEQ ID NO: 26221 - protein, 3 aa, Artificial Sequence
  Synthetic construct
KAS

SEQ ID NO: 26222 - protein, 3 aa, Artificial Sequence
  Synthetic construct
GNT

SEQ ID NO: 26223 - protein, 3 aa, Artificial Sequence
  Synthetic construct
EDN

SEQ ID NO: 26224 - protein, 3 aa, Artificial Sequence
  Synthetic construct
GAS

SEQ ID NO: 26225 - protein, 3 aa, Artificial Sequence
  Synthetic construct
DVS

SEQ ID NO: 26226 - protein, 3 aa, Artificial Sequence
  Synthetic construct
DAS

SEQ ID NO: 26227 - protein, 3 aa, Artificial Sequence
  Synthetic construct
DAS

SEQ ID NO: 26228 - protein, 3 aa, Artificial Sequence
  Synthetic construct
GAS

SEQ ID NO: 26229 - protein, 3 aa, Artificial Sequence
  Synthetic construct
EVN

SEQ ID NO: 26230 - protein, 3 aa, Artificial Sequence
  Synthetic construct
KVS

SEQ ID NO: 26231 - protein, 3 aa, Artificial Sequence
  Synthetic construct
HDT

SEQ ID NO: 26232 - protein, 9 aa, Artificial Sequence
  Synthetic construct
QQYGSSPYT

SEQ ID NO: 26233 - protein, 10 aa, Artificial Sequence
  Synthetic construct
QQYYNWPPWT

SEQ ID NO: 26234 - protein, 9 aa, Artificial Sequence
  Synthetic construct
QQYNSDLYT

SEQ ID NO: 26235 - protein, 11 aa, Artificial Sequence
  Synthetic construct
QSYDISLNGWV

SEQ ID NO: 26236 - protein, 10 aa, Artificial Sequence
  Synthetic construct
QSYDSSNHVL

SEQ ID NO: 26237 - protein, 9 aa, Artificial Sequence
  Synthetic construct
QQYGSSPLT

SEQ ID NO: 26238 - protein, 11 aa, Artificial Sequence
  Synthetic construct
SSYTSSSAYVV

SEQ ID NO: 26239 - protein, 9 aa, Artificial Sequence
  Synthetic construct
QQYDNLSLT

SEQ ID NO: 26240 - protein, 9 aa, Artificial Sequence
  Synthetic construct
QQYVNLPLT

SEQ ID NO: 26241 - protein, 8 aa, Artificial Sequence
  Synthetic construct
QQYGTSPS

SEQ ID NO: 26242 - protein, 11 aa, Artificial Sequence
  Synthetic construct
SSYAGVTNNLI

SEQ ID NO: 26243 - protein, 9 aa, Artificial Sequence
  Synthetic construct
MQGTHWPRT

SEQ ID NO: 26244 - protein, 9 aa, Artificial Sequence
  Synthetic construct
QAWGSSTAV

SEQ ID NO: 26245 - DNA, 15 bp, Artificial Sequence
  Synthetic construct
gacaagtgatctgca

SEQ ID NO: 26246 - DNA, 15 bp, Artificial Sequence
  Synthetic construct
tcatttcctccgatt

SEQ ID NO: 26247 - DNA, 15 bp, Artificial Sequence
  Synthetic construct
tacgcctataacttg

SEQ ID NO: 26248 - DNA, 15 bp, Artificial Sequence
  Synthetic construct
cttcactctgtcagg

SEQ ID NO: 26249 - DNA, 15 bp, Artificial Sequence
  Synthetic construct
gacaagtgatctgca

SEQ ID NO: 26250 - DNA, 15 bp, Artificial Sequence
  Synthetic construct
tgtgtattcccttgt

SEQ ID NO: 26251 - DNA, 15 bp, Artificial Sequence
  Synthetic construct
gcagcgtataagtca

SEQ ID NO: 26252 - DNA, 15 bp, Artificial Sequence
  Synthetic construct
agactaatagctgac

SEQ ID NO: 26253 - DNA, 15 bp, Artificial Sequence
  Synthetic construct
ggtagccctagagta

SEQ ID NO: 26254 - DNA, 15 bp, Artificial Sequence
  Synthetic construct
tcatttcctccgatt

SEQ ID NO: 26255 - DNA, 15 bp, Artificial Sequence
  Synthetic construct
tacgcctataacttg

SEQ ID NO: 26256 - DNA, 15 bp, Artificial Sequence
  Synthetic construct
cttcactctgtcagg

SEQ ID NO: 26257 - DNA, 15 bp, Artificial Sequence
  Synthetic construct
gcagcgtataagtca

SEQ ID NO: 26258 - DNA, 15 bp, Artificial Sequence
  Synthetic construct
gctcctttacacgta

SEQ ID NO: 26259 - DNA, 15 bp, Artificial Sequence
  Synthetic construct
tacgcctataacttg

SEQ ID NO: 26260 - DNA, 15 bp, Artificial Sequence
  Synthetic construct
tcatttcctccgatt

SEQ ID NO: 26261 - DNA, 15 bp, Artificial Sequence
  Synthetic construct
cttcactctgtcagg

SEQ ID NO: 26262 - DNA, 47 bp, Artificial Sequence
  Synthetic construct
  misc_feature (22)..(34): N is A, T, G, or C
ccttggcacccgagaattccannnnnnnnnnnnncccatataagaaa

SEQ ID NO: 26263 - protein, 22 aa, Artificial Sequence
  Synthetic construct
CARYTSYYDRSGFRRVEYFQHW

SEQ ID NO: 26264 - protein, 22 aa, Artificial Sequence
  Synthetic construct
CANMRTNYDIFTGYYPDAFDIW

SEQ ID NO: 26265 - protein, 12 aa, Artificial Sequence
  Synthetic construct
CARDVTHAFDLW

SEQ ID NO: 26266 - protein, 23 aa, Artificial Sequence
  Synthetic construct
CAKEGARGRGATTSFYYYYMDVW

SEQ ID NO: 26267 - protein, 22 aa, Artificial Sequence
  Synthetic construct
CARSTYYYDRSGYSTSDGMDVW

SEQ ID NO: 26268 - protein, 13 aa, Artificial Sequence
  Synthetic construct
CAREYSSTVWDNW

SEQ ID NO: 26269 - protein, 24 aa, Artificial Sequence
  Synthetic construct
CARPPRGYYDRTGYYNVVHYFQHW

SEQ ID NO: 26270 - protein, 24 aa, Artificial Sequence
  Synthetic construct
CARPPRGYYDRSGYYNVLLYFQHW

SEQ ID NO: 26271 - protein, 18 aa, Artificial Sequence
  Synthetic construct
CAKSEYSYAYKVHFLDYW

SEQ ID NO: 26272 - protein, 12 aa, Artificial Sequence
  Synthetic construct
CAREDTFYFDYW

SEQ ID NO: 26273 - protein, 15 aa, Artificial Sequence
  Synthetic construct
CARGGFNYGHGLDYW

SEQ ID NO: 26274 - protein, 19 aa, Artificial Sequence
  Synthetic construct
CAKYGWGLLAAAGDAFDIW

SEQ ID NO: 26275 - protein, 15 aa, Artificial Sequence
  Synthetic construct
CARSGSYGDRTFDHW

SEQ ID NO: 26276 - protein, 11 aa, Artificial Sequence [sequence omitted]

SEQ ID NO: 26277 - protein, 12 aa, Artificial Sequence [sequence omitted]

SEQ ID NO: 26278 - protein, 11 aa, Artificial Sequence [sequence omitted]

SEQ ID NO: 26279 - protein, 13 aa, Artificial Sequence
  Synthetic construct
CQSYDISLNGWVL

SEQ ID NO: 26280 - protein, 11 aa, Artificial Sequence [sequence omitted]

SEQ ID NO: 26281 - protein, 13 aa, Artificial Sequence [sequence omitted]

SEQ ID NO: 26282 - protein, 11 aa, Artificial Sequence [sequence omitted]

SEQ ID NO: 26283 - protein, 11 aa, Artificial Sequence [sequence omitted]

SEQ ID NO: 26284 - protein, 12 aa, Artificial Sequence [sequence omitted]

SEQ ID NO: 26285 - protein, 10 aa, Artificial Sequence [sequence omitted]

SEQ ID NO: 26286 - protein, 13 aa, Artificial Sequence
  Synthetic construct
CSSYAGVTNNLIF

SEQ ID NO: 26287 - protein, 11 aa, Artificial Sequence [sequence omitted]

SEQ ID NO: 26288 - protein, 11 aa, Artificial Sequence [sequence omitted]

SEQ ID NO: 26289 - protein, 10 aa, Artificial Sequence
  Synthetic construct
CAADPFADYW

SEQ ID NO: 26290 - protein, 18 aa, Artificial Sequence
  Synthetic construct
CARGLWFGDSETVWFDPW

SEQ ID NO: 26291 - protein, 15 aa, Artificial Sequence
  Synthetic construct
CVKGKIQLWLGADYW

SEQ ID NO: 26292 - protein, 19 aa, Artificial Sequence
  Synthetic construct
CARKPLLHSSVNPGAFDIW

SEQ ID NO: 26293 - protein, 20 aa, Artificial Sequence
  Synthetic construct
CAREKGYSSSSSATYYLDFW

SEQ ID NO: 26294 - protein, 15 aa, Artificial Sequence
  Synthetic construct
CARRVPGDYYCLDVW

SEQ ID NO: 26295 - protein, 13 aa, Artificial Sequence
  Synthetic construct
CARGGLWGTFDYW

SEQ ID NO: 26296 - protein, 16 aa, Artificial Sequence
  Synthetic construct
CARAYGGNYYYGMDVW

SEQ ID NO: 26297 - protein, 23 aa, Artificial Sequence
  Synthetic construct
CASLGGDSYISGTHYDRSGYDPW

SEQ ID NO: 26298 - protein, 14 aa, Artificial Sequence
  Synthetic construct
CARVNRVGDGPDFW

SEQ ID NO: 26299 - protein, 26 aa, Artificial Sequence
  Synthetic construct
CARDPASYYDFWSGYVDYYYYGMDVW

SEQ ID NO: 26300 - protein, 26 aa, Artificial Sequence
  Synthetic construct
CARDPASYYDLWSGYVDYYYYGMDVW

SEQ ID NO: 26301 - protein, 15 aa, Artificial Sequence
  Synthetic construct
CARSGGYRLWFGELW

SEQ ID NO: 26302 - protein, 16 aa, Artificial Sequence
  Synthetic construct
CAREGAVGATSGLDYW

SEQ ID NO: 26303 - protein, 8 aa, Artificial Sequence [sequence omitted]

SEQ ID NO: 26304 - protein, 27 aa, Artificial Sequence
  Synthetic construct
CARGAGEQRLVGGLFGVSHFYYYMDVW

SEQ ID NO: 26305 - protein, 16 aa, Artificial Sequence
  Synthetic construct
CAKSATIVLMVSAIYW

SEQ ID NO: 26306 - protein, 24 aa, Artificial Sequence
  Synthetic construct
CARVRGGEWVGDLGWYYYYGMDVW

SEQ ID NO: 26307 - protein, 11 aa, Artificial Sequence
  Synthetic construct
CVKGATKIDYW

SEQ ID NO: 26308 - protein, 15 aa, Artificial Sequence
  Synthetic construct
CTRGGWPSGDTFDIW

SEQ ID NO: 26309 - protein, 16 aa, Artificial Sequence
  Synthetic construct
CAREGGWYSVGWVDPW

SEQ ID NO: 26310 - protein, 17 aa, Artificial Sequence
  Synthetic construct
CARDRRIIGYYFGMDVW

SEQ ID NO: 26311 - protein, 14 aa, Artificial Sequence
  Synthetic construct
CARLLIEHDAFDIW

SEQ ID NO: 26312 - protein, 15 aa, Artificial Sequence
  Synthetic construct
CAREEGSGWWKHDYW

SEQ ID NO: 26313 - protein, 17 aa, Artificial Sequence
  Synthetic construct
CVRDRRIVGYYFGLDVW

SEQ ID NO: 26314 - protein, 23 aa, Artificial Sequence
  Synthetic construct
CAKDAFYYGSGSHFYYYYYMDVW

SEQ ID NO: 26315 - protein, 17 aa, Artificial Sequence
  Synthetic construct
CARDRRGGGWTASFDFW

SEQ ID NO: 26316 - protein, 15 aa, Artificial Sequence
  Synthetic construct
CARGGWPSGDTFDIW

SEQ ID NO: 26317 - protein, 13 aa, Artificial Sequence
  Synthetic construct
CAHHTVPTIYDYW

SEQ ID NO: 26318 - protein, 24 aa, Artificial Sequence
  Synthetic construct
CAKDIGRYDHYNIFGRVGGAFDIW

SEQ ID NO: 26319 - protein, 13 aa, Artificial Sequence [sequence omitted]

SEQ ID NO: 26320 - protein, 11 aa, Artificial Sequence
  Synthetic construct
CQQSYSTPPTF

SEQ ID NO: 26321 - protein, 11 aa, Artificial Sequence [sequence omitted]

SEQ ID NO: 26322 - protein, 11 aa, Artificial Sequence [sequence omitted]

SEQ ID NO: 26323 - protein, 13 aa, Artificial Sequence
  Synthetic construct
CQSYDSSLTALVF

SEQ ID NO: 26324 - protein, 12 aa, Artificial Sequence
  Synthetic construct
CQQSFSARVPTF

SEQ ID NO: 26325 - protein, 11 aa, Artificial Sequence
  Synthetic construct
CQQFAYSLYTF

SEQ ID NO: 26326 - protein, 13 aa, Artificial Sequence [sequence omitted]

SEQ ID NO: 26327 - protein, 12 aa, Artificial Sequence
  Synthetic construct
CQRRSNWPPFTF

SEQ ID NO: 26328 - protein, 11 aa, Artificial Sequence [sequence omitted]

SEQ ID NO: 26329 - protein, 11 aa, Artificial Sequence [sequence omitted]

SEQ ID NO: 26330 - protein, 11 aa, Artificial Sequence
  Synthetic construct
CHHYGSSRLTF

SEQ ID NO: 26331 - protein, 11 aa, Artificial Sequence [sequence omitted]

SEQ ID NO: 26332 - protein, 12 aa, Artificial Sequence [sequence omitted]

SEQ ID NO: 26333 - protein, 11 aa, Artificial Sequence [sequence omitted]

SEQ ID NO: 26334 - protein, 11 aa, Artificial Sequence
  Synthetic construct
CQQYNSYPWTF

SEQ ID NO: 26335 - protein, 12 aa, Artificial Sequence [sequence omitted]

SEQ ID NO: 26336 - protein, 11 aa, Artificial Sequence [sequence omitted]

SEQ ID NO: 26337 - protein, 12 aa, Artificial Sequence
  Synthetic construct
CFSYTSGGTRVF

SEQ ID NO: 26338 - protein, 12 aa, Artificial Sequence
  Synthetic construct
CQQLNSYPEITF

SEQ ID NO: 26339 - protein, 10 aa, Artificial Sequence [sequence omitted]

SEQ ID NO: 26340 - protein, 10 aa, Artificial Sequence
  Synthetic construct
CCPYADTWVF

SEQ ID NO: 26341 - protein, 11 aa, Artificial Sequence
  Synthetic construct
CMQALHFPYTF

SEQ ID NO: 26342 - protein, 11 aa, Artificial Sequence [sequence omitted]

SEQ ID NO: 26343 - protein, 10 aa, Artificial Sequence
  Synthetic construct
CCSYATTWVF

SEQ ID NO: 26344 - protein, 10 aa, Artificial Sequence [sequence omitted]

SEQ ID NO: 26345 - protein, 12 aa, Artificial Sequence
  Synthetic construct
CQQHYSTPGYTF

SEQ ID NO: 26346 - protein, 12 aa, Artificial Sequence
  Synthetic construct
CQQLNSYPEITF

SEQ ID NO: 26347 - protein, 12 aa, Artificial Sequence [sequence omitted]

SEQ ID NO: 26348 - protein, 10 aa, Artificial Sequence
  Synthetic construct
CQHYDNLPRF
